(19) United States
(12) Patent Application Publication
(10) Pub. No.: US 2018/0194861 A1
(43) Pub. Date: Jul. 12, 2018

(54) IgM- or IgE-Modified Binding Proteins and Uses Thereof

(71) Applicant: AbbVie Inc., North Chicago, IL (US)

(72) Inventors: Feng Dong, Lansdale, PA (US); Jijie Gu, Shrewsbury, MA (US); Tariq Ghayur, Holliston, MA (US)

(21) Appl. No.: 15/742,331

(22) PCT Filed: Jul. 8, 2016
(86) PCT No.: PCT/US16/41618

§ 371 Date: Jan. 5, 2018

Related U.S. Application Data
(60) Provisional application No. 62/191,038, filed on Jul. 10, 2015.
(60) Provisional application No. 62/316,951, filed on Apr. 1, 2016.

(51) Int. Cl. C07K 16/46

(52) U.S. Cl. CPC C07K 16/468; C07K 2317/31; C07K 2317/35; C07K 2319/30; C07K 2317/526; C07K 2317/64; C07K 2317/524

(57) ABSTRACT

Engineered binding proteins comprising a modified constant region, such as an IgG constant region modified to contain a CH2 domain from an IgM, a CH2 domain from an IgE, or a variant thereof, are disclosed. The binding proteins can be multispecific, including bi-, tri-, and tetra-specific constructs. Also disclosed are uses of the binding proteins in the diagnosis, prevention, and/or treatment of disease.

[0001] This is a national stage application under 35 U.S.C. § 371 of international application number PCT/US2016/041618, filed Jul. 8, 2016, which designated the U.S. and which claims priority to U.S. Provisional Application Ser. No. 62/191,038, filed Jul. 10, 2015, and U.S. Provisional Application Ser. No. 62/316,951 filed Apr. 1, 2016, all of which are incorporated herein by reference in their entirety.

### SEQUENCE LISTING

[0002] The instant application contains a Sequence Listing which has been submitted electronically in ASCII format and is hereby incorporated by reference in its entirety. Said ASCII copy, created on Sep. 13, 2016, is named 12252_0204-00304_SL.txt and is 902,459 bytes in size.

### FIELD

[0003] Disclosed herein are engineered binding proteins comprising a modified constant region, such as an IgG constant region modified to contain a CH2 domain from an IgM, a CH2 domain from an IgE, or a variant thereof, as well as their uses in the diagnosis, prevention, and/or treatment of disease.

### BACKGROUND

[0004] Engineered proteins, such as multispecific binding proteins capable of binding two or more antigens, are known in the art. Such multispecific binding proteins can be generated using cell fusion, chemical conjugation, or recombinant DNA techniques.

[0005] Production of multispecific binding proteins by co-expression of light and heavy chains, e.g., from different antibodies, in a single host cell can result in low yield of the desired bispecific due to mispairing of heterologous heavy and light chain sequences. For instance, where a bispecific antibody is intended to have heterologous binding domains on the two antibody arms (i.e., a binding site for antigen A on the first arm and for antigen B on the second arm), various mispairings can occur during co-expression of the light and heavy chains in a single cell. These include a heavy chain heterodimer with light chain mispairings, and heavy chain homodimers with or without light chain mispairing. When co-expressing two different antibody heavy and light chains in one cell line, assuming random chain association, a total of 16 combinations are possible. Of those, six are identical. Thus, a purely statistical association leads to 6 tetramers that occur twice (each 12.5% yield) and 4 tetramers that occur once (each 6.25%). The desired bispecific binding protein makes up statistically 12.5% of the total yield. Purification by removing the nine closely-related mispaired structures that occur during single cell synthesis is often difficult and inefficient.

[0006] Homo-dimerization of two heavy chains, rather than the desired heterodimerization, during formation of a binding protein such as an IgG is largely mediated by interaction between the CH3 domains. One option to ensure correct hetero-dimerization in a bispecific antibody format has been to engineer modified heavy chain CH3 domains that only interact in a heterodimeric format. Several IgG CH3 hetero-dimerization strategies are known in the art.

[0007] An alternative option for overcoming the heavy chain-pairing problem in bispecific antibodies is to use a common heavy chain. For example, κλ-bodies contain a common heavy chain plus κ and λ light chains to confer the two different antigen specificities. Two sequential affinity purification steps are used to purify κλ-bodies with their κ and λ light chains away from monospecific antibodies that contain a single type of light chain.

[0008] While the structures described above may address the issue of random heavy chain association, they do not ensure correct light chain association. Thus, even with complete heavy chain hetero-dimerization, a mixture of the desired multispecific construct and unwanted contaminants may result from random light chain association. As such, a method of eliminating light chain mispairing would be beneficial to improve multispecific binding protein yield.

### SUMMARY OF THE DISCLOSURE

[0009] Disclosed herein are engineered binding proteins comprising a modified constant region to improve pairing of the correct heavy and light chain sequences, as well as ensuring heterodimeric heavy chain pairing. In various embodiments, the binding proteins, such as heterodimeric binding proteins containing an IgG constant region, are modified to contain a CH2 domain from an IgM or IgE in place of a wild-type CH1 domain, as well as further modifications to ensure correct heavy-light chain pairing and heterodimeric heavy chain pairing. Also disclosed, in various embodiments, are bispecific, trispecific, tetraspecific and other multispecific molecules containing the modified heavy and light chains, as well as their uses in the diagnosis, prevention, and/or treatment of various disease.

[0010] In various embodiments, a binding protein is disclosed, comprising a first heavy chain and a first light chain forming an antigen binding region and a modified constant region comprising a modified CH1 domain (CH1*) and a modified CL domain (CL*), wherein the CH1* domain comprises an IgM CH2 domain, an IgE CH2 domain, or a variant thereof; and the CL* domain comprises an IgM CH2 domain, an IgE CH2 domain, or a variant thereof, and wherein the heavy chain and light chain interact at one or more interface between the CH1* and CL*. In some embodiments, the CH1* domain is an IgM CH2 domain, an IgE CH2 domain, or a variant thereof; and the CL* domain is an IgM CH2 domain, an IgE CH2 domain, or a variant thereof. In some embodiments, the CH1* and CL* comprise variants of an IgM or IgE CH2 domain that have been modified to increase electrostatic or hydrophobic interactions at the one or more interface. In some embodiments, the IgM or IgE CH2 domain variants promote heavy chain and light chain heterodimer pairing, and inhibit homodimer pairing of two heavy chains or two light chains. In certain embodiments, the constant region comprises an IgG hinge region, and wherein the hinge region is further modified to remove at least one cysteine residue found in a wild-type IgG hinge region, which may reduce the number of disulfide bonds formed with the IgM or IgE CH2 domain. In some embodiments, the IgM or IgE CH2 domain variant comprises a CH1, C kappa, or C lambda DE loop in place of a wild-type IgM or IgE CH2 DE loop.

[0011] In some embodiments, the binding protein comprises, prior to modification, a wild-type human IgG constant region. In some embodiments, the IgG constant region prior to modification is a human wild-type IgG1, IgG2a, IgG2b, IgG3, or IgG4 subtype. In certain embodiments, the modified constant region comprises a fragment of a wild-type IgG, e.g., one which lacks all or a part of an IgG CH3 domain.

[0012] In various embodiments, the binding protein is a bispecific or multispecific binding protein, e.g., a bispecific antibody, a multispecific antibody, or a dual variable domain immunoglobulin (DVD-Ig) binding protein.

[0013] In some embodiments, the antigen binding region in a binding protein disclosed herein comprises one, two, three, four, or more antigen binding sites that bind the same or different antigen targets. In some embodiments, the antigen binding sites are derived from parental antibody variable domains and/or T-cell receptor binding regions.

[0014] In various embodiments, the binding protein comprises a second heavy chain and a second light chain, wherein the second heavy chain and second light chain interact at one or more interface. In some embodiments, the second heavy chain comprises a wild-type IgG heavy chain constant region and a wild-type IgG light chain constant region. In some embodiments, the first heavy chain comprises a modified CH3 domain, and the second heavy chain comprises a modified CH3 domain, and wherein the modified CH3 domains are preferably modified IgG CH3 domains, wherein the modifications promote pairing of the first and second heavy chains at one or more interface in the CH3 domains on the first and second heavy chains, and inhibit homodimer formation of two first heavy chains or two second heavy chains (e.g., using knobs-into holes or electrostatic modifications).

[0015] In various embodiments, a binding protein disclosed herein can be conjugated to another agent, e.g., an immunoadhesion molecule, an imaging agent, a therapeutic agent, or a cytotoxic agent. In various embodiments, a pharmaceutical composition is disclosed, comprising a binding protein disclosed herein and a pharmaceutically acceptable carrier, and optionally a further therapeutic agent.

[0016] Also disclosed herein are nucleic acid(s) encoding the binding proteins, as well as vectors and host cells containing the nucleic acid(s). Also disclosed, in various embodiments, are methods of treating a subject for a disease or a disorder by administering a binding protein disclosed herein. Also disclosed are methods of detecting the presence, amount, or concentration of at least one target or fragment thereof in a test sample by an immunoassay using a binding protein disclosed herein, and kits for use in detecting the presence, amount, or concentration of at least one target or fragment thereof comprising a binding protein disclosed herein.

### BRIEF DESCRIPTION OF THE DRAWINGS

[0017] FIG. 1 shows exemplary IgM CH2 and IgE CH2 sequences and structures. FIG. 1A is a schematic illustration of IgG and IgM immunoglobulins. FIG. 1B shows sequences of the human MH2 and EH2 (SEQ ID NOS 323-324, respectively, in order of appearance). Beta sheets are annotated as A, B, C, D, E, F and G. The loops between each beta sheet are annotated as AB, BC, CD, DE, EF, and FG. Dimer interface residues are underlined, which include residues within 5 Å of paired chain in modeled human MH2 dimer and 2Y7Q.pdb for human EH2 dimer. The potential N-glycosylation sites, 120NAS on MH2 and 38NIT on EH2, are italicized.

[0018] FIG. 2 shows exemplary MH2 hetero-dimerization engineering through electrostatic interactions. FIG. 2A shows an alignment of MH2, MH2p, and MH2n amino acid sequences (SEQ ID NOS 325-327, respectively, in order of appearance). The mutations are underlined.

[0019] FIG. 2B shows multiple electrostatic interactions on the MH2 dimer interface through 2 sets of 3 major inter-chain pairs: D12-Q119, K20-Q24, and D81-K85.1. FIG. 2C shows the MH2p is created by 2 positive mutations Q24K and D81K while MH2n is created by 3 negative mutations K20E, Q24E, and K85.1D. Attractive electrostatic interactions form between MH2p and MH2n.

[0020] FIG. 3 shows exemplary MH2 heterodimer engineering through hydrophobic interactions. FIG. 3A shows an alignment of MH2, MH2k, and MH2h amino acid sequences (SEQ ID NOS 328-330, respectively, in order of appearance). The mutations are underlined. FIG. 3B shows that residue I22, Q24, and T86 are on the MH2 dimer interface and close to each other. FIG. 3C shows that MH2k is created by introducing mutation I22W on one MH2 while MH2h is created by introducing mutation I22A, Q24S, and T86A on the other MH2. Attractive hydrophobic interactions form between MH2k and MH2h.

[0021] FIG. 4A shows an expression vector used to produce the wild type or engineered MH2 domains as described in Examples 2.1 and 2.2. FIG. 4A discloses SEQ ID NO: 331. FIG. 4B shows the expression profiles of the wild type and engineered MH2 domains under a non-reducing or reducing condition. FIG. 4B discloses “6His” as SEQ ID NO: 331.

[0022] FIG. 5 compares an MH2 or EH2 homodimer with an IgG CH1/C_{κ}(λ) heterodimer. FIG. 5A shows an alignment of IgG CH1, C_{κ}, Cλ, MH2 and EH2 amino acid sequences (SEQ ID NOS 332-336, respectively, in order of appearance). The beta sheets are annotated as A, B, C, D, E, F and G. The loops between each beta sheet are annotated as AB, BC, CD, DE, EF, and FG. The dimerization interface residues are underlined (residues within 5 Å of the paired chain in 1N8Z.pdb for CH1 and Cκ, modeled human MH2 dimer for MH2, and 2Y7Q.pdb for EH2). FIG. 5B shows the modeled human MH2 dimer based on 4JVU.pdb (left image) and a modeled MH2 dimer superimposed with CH1/Cκ hetero-dimer from 1N8Z.pdb (right image). Inter-chain and intra-chain disulfide bonds are shown as sticks. The glycosylation sites on the MH2 dimer are shown as spheres.

[0023] FIG. 6 shows the use of an MH2 or EH2 homodimer to replace CH1/κ(λ) in the IgG molecule. In addition to the desired molecule A, alternate structures result from MH2 or EH2 homo-dimerization, shown in box B.

[0024] FIG. 7 shows DE Loop engineering on MH2 to improve VH/MH2 and/or VL/MH2 interface. DE loops in IgG CH1, Cκ, and MH2 are underlined. The DE loop of IgG CH1 is grafted onto MH2 when MH2 is used to replace the IgG CH1 to create MH2mH. The DE loop of IgG Cκ is grafted onto MH2 when MH2 is used to replace the IgG Cκ to create MH2 mL. Figure discloses SEQ ID NOS 337-341, respectively, in order of appearance.

[0025] FIG. 8 shows use of MH2 (MH2a/MH2b) or EH2 (EH2a/EH2b) heterodimers to replace one arm CH1/κ(λ) in knobs-into-holes format to overcome light chain and heavy chain mispairing simultaneously in bispecific IgG generation.

[0026] FIG. 9 shows sequence alignments for TCR Cα, Cβ, IgG CH1, Cκ, Cλ, MH2, and EH2 (SEQ ID NOS 342-348, respectively, in order of appearance). The beta sheets are annotated as A, B, C, D, E, F, and G. The loops between each beta sheet are annotated as AB, BC, CD, DE, EF, and FG.

[0027] FIG. 10 shows the building of an Ig-like molecule with Vα/Vβ to obtain binding to peptide presented by antigen presenting cells. MH2a/MH2b or EH2a/EH2b stands for engineered MH2 or EH2 hetero-dimer.

[0028] FIG. 11 shows MH2 or EH2 hetero-dimer use to stabilize outer or inner variable domains in DVD-Ig molecules. In format A, B, G, and H, both the heavy and light chains are connected. In format B, C, I, and J, only the heavy chain is connected. In format D, E, K, and L, only the light chain is connected. The linker in the heavy and/or light chain may be cleavable. MH2a/MH2b may be replaced by EH2a/EH2b. Both MH2a/MH2b and EH2a/EH2b are engineered hetero-dimers. VD1 pairs with VD2 to form an antigen binding domain. VD3 pairs with VD4 to form another antigen binding domain.

[0029] FIG. 12 shows exemplary MH2 or EH2 homo- and/or hetero-dimers used as dimerization building blocks to build bi/multi-specific IgG like molecules with antibody variable domains (VH/VL) and/or TCR (Vα/Vβ). MH2WT is an MH2 homodimer. MH2pn and MH2hk are MH2 heterodimers engineered by the approaches described in Example 2.

[0030] FIG. 13 shows exemplary MH2 or EH2 used as dimerization building blocks to build bi/multi-specific fragment molecules with antibody variable domains VH/VL and/or TCR. Vα/Vβ MH2WT is MH2 homodimer. MH2pn and MH2hk are MH2 heterodimers engineered by the approaches described in Example 2.

[0031] FIG. 14 shows the binding of three exemplary bivalent monospecific MH2n/p molecules (AB596-MH2n/p, D2E7-MH2n/p, and Herceptin-MH2n/p) to three different cell lines expressing their target antigens. The first column shows the binding of AB596-MH2n/p molecule to Jurkat cells. The middle column shows the binding of D2E7-MH2n/p molecule to L929 cells. The last column shows the binding of Herceptin-MH2n/p molecule to N87 cells. The ability of each molecule to bind to its target was confirmed by a FACS binding assay.

[0032] FIG. 15 shows the molecular profiles of exemplary bispecific MH2 molecules analyzed by SEC assay. The SEC profiles of molecules KIH2, MMH3, BMH6, BMH7, BMH8, BMH9 and BMH10 are shown from top to bottom, respectively.

[0033] FIG. 16 shows the binding of bispecific BMH molecules (BMH6-10) to A431 cells expressing hEGFR, as confirmed by a FACS binding assay. A knobs-into-hole bispecific molecule KIH2 and a monovalent Cetuximab in Half-DVD-Cetux-CD3 were also tested for comparison.

[0034] FIG. 17 shows the binding of bispecific BMH molecules (BMH6-10) to N87 cells expressing hHER2, as confirmed by a FACS binding assay. A knobs-into-hole bispecific molecule KIH2 and a monovalent herceptin in half Herceptin molecule were tested for comparison.

[0035] FIG. 18 shows the binding of binding protein PLY11 (olive), TS2/18 halfbody (magenta), DVD860 halfbody (yellow), and binding protein TMH1 (green) to three different cell lines (CD3 negative Jurkat cells, regular Jurkat cells, and A431 cells), as measured by a FACS binding assay.

[0036] FIG. 19A shows a schematic structure of exemplary trispecific molecules, TMH16-18, used in a FACS binding assay. FIG. 19B shows the binding of those three trispecific molecules to three different cell lines expressing their target antigens (A431 cells, JKT CD3 positive cells, and CHO-PDL1 cells), as measured by a FACS binding assay. A KIH6 knobs-into-holes binding protein, an anti-PDL1 YW243 halfbody, and an anti-EGFR/CD3 DVD860.2 halfbody were also tested in this binding assay. A control DVD-Ig binding protein (DVD889 [hu IgG1/k]) was used as a negative control.

[0037] FIG. 20A depicts a schematic structure of the trispecific molecules, TMH21-23 used in a FACS binding assay. FIG. 20B shows the binding of those trispecific molecules to three different cell lines expressing their target antigens (A431 cells, JKT CD3 positive cells, and 293G-PD1 cells). A KIH7 knobs-into-holes binding protein, an anti-PD1 AB426 halfbody, and an anti-EGFR/CD3 DVD860.2 halfbody were also tested for comparison. The binding was measured by a FACS binding assay. DVD889 [hu IgG1/k] was used as a negative control.

[0038] FIG. 21A-C show the binding of the teteraspecific molecules PLY13-20 to three cell lines expressing their target antigens (A431 cells, Jurkat CD3 positive cells, and Jurkat CD3 negative cells, respectively), as measured by a FACS binding assay. The anti-CD2 TS2/18 halfbody, anti-4-1-BB AB430 halfbody, and anti-EGFR/CD3 DVD860 halfbody were also tested for comparison. FIG. 21D shows a schematic structure of the tetraspecific molecules used in this study.

[0039] FIG. 22A shows schematic structures of a DuoFab Ig MH2n/p molecule and each heavy and light chain used in the complete structure. FIG. 22B shows the binding of DuoFab Ig MH2n/p molecules, NBD001-003, to three cell lines expressing their target antigens (293/PSMA cells, 293/STEAP1 cells, and LnCap cells), as measured by a FACS binding assay. The parental anti-STEAP1 antibody TPP3956 and anti-PSMA hPSMA17.1 were also tested for comparison. DVD889 [hu IgG1/k] was used as a negative control.

### DETAILED DESCRIPTION

[0040] In order to reduce or eliminate the unwanted mispairing of heavy and light chains in multispecific binding proteins, a strategy to overcome both heavy chain and light chain mispairing is needed. Heavy and light chains pair through a dimerization symmetry of the CH1/Cκ or CH1/Cλ (referred to collectively herein as CH1/Cκ(λ)). On a binding protein such as an IgG antibody, this heavy and light chain pairing occurs independently on both arms of the construct. While a common light chain could be used to eliminate possible mispairing, many bispecific constructs require the use of different light chains for the two antigen binding sites.

[0041] Disclosed herein are binding proteins that overcome the light chain mispairing problem in multispecific constructs. In various embodiments, IgM CH2 (“MH2”) or IgE CH2 (“EH2”) domains are used to address the problem. For instance, in a bispecific antibody or other heterologous two-arm construct (such as a DVD-Ig binding protein having different binding domains on the first arm and second arm), an MH2 or EH2 domain or variant thereof can be used on one arm in place of a CH1/κ(λ) (e.g., to replace a CH1/κ(λ) in an IgG constant region), and normal CH1/κ(λ) can be used on the other arm to ensure correct heavy-light chain pairing on both arms while preserving the structural and functional integrity of the variable domains. In various embodiments, other modifications can also be used to ensure correct heterodimeric heavy chain pairing, such as any of the modifications mentioned in Table 1 below (e.g., knobs-into-holes or duobody techniques).

[0042] In various embodiments, mutations to wild type MH2 or EH2 that support hetero-dimerization (MH2a paired with MH2b, or EH2a paired with EH2b) can be identified by molecular modeling-based rational design, or by library-based molecular evolution including, but not limited to, phage display, yeast display, bacterial display, DNA display, mRNA display, and ribosomal display technologies. The mutations identified on MH2a or EH2a and their complementary MH2b or EH2b, respectively, that enable MH2a/MH2b or EH2a/EH2b hetero-dimerization can be based on complementary hydrophobic interaction, or electrostatic interaction, or a combination of the two, via changes introduced between MH2a and MH2b or between EH2a and EH2b. In some embodiments, changes are introduced into interface regions of MH2a and MH2b, or of EH2a and EH2b (e.g., those amino acid positions on MH2a that are within 5 angstroms of an amino acid on the counterpart MH2b, or those amino acid positions on EH2a that are within 5 angstroms of an amino acid on the counterpart EH2b). In some embodiments, the modifications alter electrostatic or hydrophobic interactions (e.g., “knobs-into-holes”) at the interface.

[0043] In various embodiments, the engineered MH2a/MH2b or EH2a/EH2b can replace CH1/Cκ(λ) dimer (e.g., in an IgG such as an IgG1 constant region) and function properly (e.g., in an IgG format by supporting the formation of functional variable domains capable of binding their antigen targets). In some embodiments, the engineered MH2a/MH2b or EH2a/EH2b replaces CH1/κ(λ) on one arm of a binding protein, while a wild-type CH1/κ(λ) remains on the other arm. In various embodiments, the “wild-type” sequences are those of human wild-type sequences.

[0044] In some embodiments, further modifications to the CH3 regions (e.g., modifications to the CH3 regions in an IgG binding protein) ensure proper pairing of the arm containing the engineered MH2a/MH2b or EH2a/EH2b with the arm that contains a wild-type CH1/Cκ(λ). For instance, modifications in the CH3 domains to alter electrostatic or hydrophobic interactions at the interface can be introduced (e.g., “knobs-into-holes” such as those described in U.S. Pat. No. 8,216,805).

[0045] In various embodiments, one or more N-glycosylation site on MH2 or EH2 could be added or removed to match the glycosylation pattern of a wild-type construct, such as an IgG, or to alter other desired properties such as pharmacokinetic properties or manufacturability. In some embodiments, the MH2 or EH2 domains can be modified to remove their DE Loop domains and replace them with IgG CH1 loop domains to mimic the interactions between CH1 and VH or the interactions between Cκ(λ) and Vκ (λ), respectively. In some embodiments, one or more cysteine residues can be removed from an MH2 or EH2 to mimic the disulfide bond interaction between an IgG CH1 domain and the hinge region.

[0046] In some embodiments, one or more of the antigen binding domains in an MH2 or EH2-modified binding protein comprises sequences from a T-cell receptor (TCR), such as the Vα and Vβ sequences. In some embodiments, the binding protein comprises a mixture of (1) antibody variable domains forming functional binding sites, and (λ) TCR binding domains.

[0047] In various embodiments, the MH2 or EH2-modified binding proteins (e.g., modified IgG binding proteins) can provide heterodimeric building blocks for constructing multi-specific binding protein formats (e.g., bi-, tri- or tetra-specific) molecules with improved functional and biophysical properties, and/or improved manufacture efficiency. In some embodiments, the binding protein is a bispecific antibody. In some embodiments, the binding protein is a DVD-Ig binding protein. In some embodiments, the DVD-Ig binding protein is further modified. In some embodiments, the modified DVD-Ig binding protein is referred as a Duo-Fab Ig binding protein. In some embodiments, the MH2a/MH2b or EH2a/EH2b heterodimer can stabilize an outer or inner binding domain of a DVD-Ig binding protein. In some embodiments, the MH2a/MH2b or EH2a/EH2b is connected to one or more DVD-Ig variable domains directly or via a linker (including a cleavable linker).

### Binding Proteins

[0048] In various embodiments, the modified binding protein disclosed herein can be an antibody or antigen-binding fragment thereof. In an embodiment, the binding protein is an antibody, a murine antibody, a CDR-grafted antibody, a human antibody, a humanized antibody, a bispecific antibody, a chimeric antibody, a Fab, a Fab′, a F(ab′)₂, an scFv, an SMIP, an affibody, an avimer, a versabody, a nanobody, a fynomab, a domain antibody, or an antigen binding fragment of any of the foregoing. In an embodiment, the binding protein is capable of binding one or more of its antigen targets with high affinity and/or potency. In an embodiment, the binding protein is a neutralizing binding protein.

[0049] In various embodiments, the binding protein is a multispecific binding protein. In an embodiment, the binding protein is a bispecific antibody. In certain embodiments, the bispecific antibody is produced by quadroma technology (Milstein and Cuello (1983) Nature 305(5934): 537-40), by chemical conjugation of two different monoclonal antibodies (Staerz et al. (1985) Nature 314(6012): 628-31), or by knob-into-hole or similar approaches which introduces mutations in the Fc region (e.g., U.S. Pat. No. 8,216,805 and Holliger et al. (1993) Proc. Natl. Acad. Sci. USA 90(14): 6444-6448).

[0050] In some embodiments, the multispecific binding protein is a dual variable domain immunoglobulin (DVD-Ig), e.g., as disclosed in U.S. Pat. No. 7,612,181 (incorporated herein by reference in their entirety). In some embodiments, the DVD-Ig binding protein comprises first and second polypeptide chains, each independently comprising VD1-(X1)n-VD2-C-X2, wherein: VD1 is a first variable domain; VD2 is a second variable domain; C is a constant domain; X1 is a linker; X2 is an Fc region that is either present or absent; n is independently 0 or 1 on the first and second chains, and wherein the VD1 domains on the first and second polypeptide chains form a first functional target binding site and the VD2 domains on the first and second polypeptide chains form a second functional target binding site. In some embodiments, the binding protein is a tri-variable domain binding protein, similar to a DVD-Ig with an additional antigen binding site attached to the N-terminus of the DVD-Ig either directly or via a linker, such that three antigen binding domains are present in parallel in the construct. In some embodiments, the MH2 or EH2 hetero-dimer is used to stabilize outer or inner variable domains in a DVD-Ig binding protein. In some embodiments, the MH2 or EH2 hetero-dimer is placed between the first and second functional target binding site. In some embodiments, the MH2 or EH2 hetero-dimer is placed at the C-terminus of the second functional target binding site.

[0051] In some embodiments, the DVD-Ig binding protein is further modified. In some embodiments, the modified DVD-Ig binding protein is referred as a Duo-Fab Ig binding protein. For instance, the modified DVD-Ig binding protein may comprise first, second, and third polypeptide chains, wherein the first polypeptide chain comprises two variable domains while the second and third polypeptide chains independently comprise one variable domain. The two variable domains of the first polypeptide chain form two functional target binding sites by independently interacting with each variable domain in the second and third polypeptide chains. In some embodiments, the MH2 or EH2 hetero-dimer is used to stabilize outer or inner variable domains in the modified DVD-Ig binding protein. In some embodiments, the MH2 or EH2 hetero-dimer is placed between the first and second functional target binding site. In some embodiments, the MH2 or EH2 hetero-dimer is placed at the C-terminus of the second functional target binding site. In some embodiments, the modified DVD-Ig binding protein comprises two first polypeptide chains, two second polypeptide chains, and two third polypeptide chains, forming four functional target binding sites. Various exemplary structures of the modified DVD-Ig binding protein are depicted in FIG. 11. An exemplary structure of a Duo-Fab Ig binding protein and exemplary first, second, and third polypeptide chains used to construct the complete Duo-Fab Ig binding protein are shown in FIG. 22A.

[0052] In some embodiments, a binding protein described herein comprises multiple antigen binding sites on each arm of the construct (e.g., a DVD-Ig comprising a first binding site linked to a second binding site directly or through intervening linkers). For instance, the binding protein can be a DVD-Ig binding protein and comprise an X1 linker on each of the first and second polypeptide chain and an X2 Fc region on one of the two chains. The X1 linkers on the first and second polypeptide chains, if present, can have the same or different sequences. In one embodiment, the X1 on the first and second polypeptide chains are short (“S”) (e.g., 6 amino acid or shorter) linkers. In another embodiment, the X1 on the first and second polypeptide chains are long (“L”) (e.g., greater than 6 amino acid) linkers. In another embodiment, the X1 on the first chain is a short linker and the X1 on the second chain is a long linker. In another embodiment, the X1 on the first chain is a long linker and the X1 on the second chain is a short linker.

[0053] In some embodiments, at least one linker between variable domains in a binding protein comprises AKTTPKLEEGEFSEAR (SEQ ID NO: 1); AKTTPKLEEGEFSEARV (SEQ ID NO: 2); AKTTPKLGG (SEQ ID NO: 3); SAKTTPKLGG (SEQ ID NO: 4); SAKTTP (SEQ ID NO: 5); RADAAP (SEQ ID NO: 6); RADAAPTVS (SEQ ID NO: 7); RADAAAAGGPGS (SEQ ID NO: 8); RADAAAA(G₄S)₄ (SEQ ID NO: 9), SAKTTPKLEEGEFSEARV (SEQ ID NO: 10); ADAAP (SEQ ID NO: 11); ADAAPTVSIFPP (SEQ ID NO: 12); TVAAP (SEQ ID NO: 13); TVAAPSVFIFPP (SEQ ID NO: 14); QPKAAP (SEQ ID NO: 15); QPKAAPSVTLFPP (SEQ ID NO: 16); AKTTPP (SEQ ID NO: 17); AKTTPPSVTPLAP (SEQ ID NO: 18); AKTTAP (SEQ ID NO: 19); AKTTAPSVYPLAP (SEQ ID NO: 20); ASTKGP (SEQ ID NO: 21); ASTKGPSVFPLAP (SEQ ID NO: 22), GGGGSGGGGSGGGGS (SEQ ID NO: 23); GENKVEYAPALMALS (SEQ ID NO: 24); GPAKELTPLKEAKVS (SEQ ID NO: 25); or GHEAAAVMQVQYPAS (SEQ ID NO: 26); TVAAPSVFIFPPTVAAPSVFIFPP (SEQ ID NO: 27); ASTKGPSVFPLAPASTKGPSVFPLAP (SEQ ID NO: 28); GGGGSGGGGS (SEQ ID NO: 29); GGSGGGGSG (SEQ ID NO: 30); or G/S based sequences (e.g., G4S and G4S repeats; SEQ ID NO: 31).

[0054] In an embodiment, the linker is a cleavable linker. In an embodiment, the linker is cleavable by one or more enzyme or agent selected from the group consisting of a zinc-dependent endopeptidase, Matrix Metalloproteinase (MMP), a serralysin, an astacin, an adamalysin, MMP-1; MMP-2; MMP-3; MMP-7; MMP-8; MMP-9; MMP-10; MMP-11; MMP-12; MMP-13; MMP-14; MMP-15; MMP-16; MMP-17; MMP-18; MMP-19; MMP-20; MMP-21; MMP-22; MMP-23A; MMP-23B; MMP-24; MMP-25; MMP-26; MMP-27; MMP-28; a Disintegrin and Metalloproteinase (ADAM); ADAM17; ADAMTS1; ADAM1; ADAM10; ADAM8; ADAMTS4; ADAMTS13; ADAM12; ADAM15; ADAM9; ADAMTS5; ADAM33; ADAM11; ADAM2; ADAMTS2; ADAMTS9; ADAMTS3; ADAMTS7; ADAM22; ADAM28; ADAMTS12; ADAM19; ADAMTS8; ADAM29; ADAM23; ADAM3A; ADAM18; ADAMTS6; ADAM7; ADAMDES1; ADAM20; ADAM6; ADAM21; ADAM3B; ADAMTSL3; ADAMTSL4; ADAM30; ADAMTS20; ADAMTSL2; a Caspase; Caspases 1-12, Caspase 14; a Cathepsin; Cathepsin G; Cathepsin B; Cathepsin D; Cathepsin L1; Cathepsin C; Cathepsin K; Cathepsin S; Cathepsin H; Cathepsin A; Cathepsin E; Cathepsin L; Cathepsin Z; Cathepsin F; Cathepsin G-like 2; Cathepsin L-like 1; Cathepsin W; Cathepsin L-like 2; Cathepsin L-like 3; Cathepsin L-like 4; Cathepsin L-like 5; Cathepsin L-like 6; Cathepsin L-like 7; Cathepsin O; a Calpain; Calpain 3; Calpain 10; Calpain 1 (mu/l) large subunit; Calpain, small subunit 1; Calpain 2, (mu/l); large subunit; Calpain 9; Calpain 11; Calpain 5; Calpain 6; Calpain 13; Calpain 8; Calpain, small subunit 2; Calpain 15; Calpain 12; Calpain 7; and Calpain 8.

[0055] In an embodiment, a binding protein disclosed herein has an on rate constant (Kₒₙ) to one or more targets of at least about 10²M⁻¹s⁻¹; at least about 10³M⁻¹s⁻¹; at least about 10⁴M⁻¹s⁻¹; at least about 10⁵M⁻¹s⁻¹; or at least about 10⁶M⁻¹s⁻¹, as measured by surface plasmon resonance. In an embodiment, the binding protein has an on rate constant (Kₒₙ) to one or more targets from about 10²M⁻¹s⁻¹ to about 10³M⁻¹s⁻¹; from about 10³M⁻¹s⁻¹ to about 10⁴M⁻¹s⁻¹; from about 10⁴M⁻¹s⁻¹ to about 10⁵M⁻¹s⁻¹; or from about 10⁵M⁻¹s⁻¹ to about 10⁶M⁻¹s⁻¹, as measured by surface plasmon resonance.

[0056] In another embodiment, the binding protein has an off rate constant (K_{off}) for one or more targets of at most about 10⁻³s⁻¹; at most about 10⁻⁴s⁻¹; at most about 10⁻⁵s⁻¹; or at most about 10⁻⁶s⁻¹, as measured by surface plasmon resonance. In an embodiment, the binding protein has an off rate constant (K_{off}) to one or more targets of about 10⁻³s⁻¹ to about 10⁻⁴s⁻¹; of about 10⁻⁴s⁻¹ to about 10⁻⁵s⁻¹; or of about 10⁻⁵s⁻¹ to about 10⁻⁶s⁻¹, as measured by surface plasmon resonance.

[0057] In another embodiment, the binding protein has a dissociation constant (K_{d}) to one or more targets of at most about 10⁻⁷M; at most about 10⁻⁸M; at most about 10⁻⁹M; at most about 10⁻¹⁰M; at most about 10⁻¹¹M; at most about 10⁻¹²M; or at most 10⁻¹³M. In an embodiment, the binding protein has a dissociation constant (K_{d}) to its targets of about 10⁻⁷M to about 10⁻⁸M; of about 10⁻⁸M to about 10⁻⁹M; of about 10⁻⁹M to about 10⁻¹⁰M; of about 10⁻¹⁰M to about 10⁻¹¹M; of about 10⁻¹¹M to about 10⁻¹²M; or of about 10⁻¹² to M about 10⁻¹³M.

[0058] In an embodiment, a binding protein disclosed herein is conjugated to an agent. In an embodiment, the agent is an immunoadhesion molecule, an imaging agent, a therapeutic agent, or a cytotoxic agent. In an embodiment, the imaging agent is a radiolabel, an enzyme, a fluorescent label, a luminescent label, a bioluminescent label, a magnetic label, or biotin. In another embodiment, the radiolabel is ³H, ¹⁴C, ³⁵S, ⁹⁰Y, ⁹⁹Tc, ¹¹¹In, ¹²⁵I, ¹³¹I, ¹⁷⁷Lu, ¹⁶⁶Ho, or ¹⁵³Sm. In yet another embodiment, the therapeutic or cytotoxic agent is an anti-metabolite, an alkylating agent, an antibiotic, a growth factor, a cytokine, an anti-angiogenic agent, an anti-mitotic agent, an anthracycline, toxin, or an apoptotic agent, or an immunosuppressive agent.

[0059] In an embodiment, the binding protein is a crystallized binding protein and exists as a crystal. In an embodiment, the crystal is a carrier-free pharmaceutical controlled release crystal. In another embodiment, the crystallized binding protein has a greater half-life in vivo than the soluble counterpart of the binding protein. In yet another embodiment, the crystallized binding protein retains biological activity.

[0060] In an embodiment, a composition is provided for the release of a binding protein, wherein the composition comprises a crystallized binding protein, an ingredient, and at least one polymeric carrier. In an embodiment, the polymeric carrier is poly (acrylic acid), a poly (cyanoacrylate), a poly (amino acid), a poly (anhydride), a poly (depsipeptide), a poly (ester), poly (lactic acid), poly (lactic-co-glycolic acid) or PLGA, poly (b-hydroxybutryate), poly (caprolactone), poly (dioxanone), poly (ethylene glycol), poly ((hydroxypropyl) methacrylamide, poly [(organo)phosphazene], a poly (ortho ester), poly (vinyl alcohol), poly (vinylpyrrolidone), a maleic anhydride-alkyl vinyl ether copolymer, a pluronic polyol, albumin, alginate, cellulose, a cellulose derivative, collagen, fibrin, gelatin, hyaluronic acid, an oligosaccharide, a glycaminoglycan, a sulfated polysaccharide, or blends and copolymers thereof. In an embodiment, the ingredient is albumin, sucrose, trehalose, lactitol, gelatin, hydroxypropyl-β-cyclodextrin, methoxypolyethylene glycol, or polyethylene glycol.

[0061] In an embodiment, the binding protein described herein is glycosylated. For example, the glycosylation pattern is a human glycosylation pattern.

[0062] Also disclosed herein is a pharmaceutical composition comprising a binding protein and a pharmaceutically acceptable carrier. In an embodiment, the pharmaceutical composition also comprises at least one additional therapeutic agent for treating a disorder. For example, the additional agent may be a therapeutic agent, an imaging agent, a cytotoxic agent, an angiogenesis inhibitor (including but not limited to an anti-VEGF antibody or a VEGF-trap), a kinase inhibitor (including but not limited to a KDR and a TIE-2 inhibitor), a co-stimulation molecule blocker (including but not limited to anti-B7.1, anti-B7.2, CTLA4-Ig, anti-CD20), an adhesion molecule blocker (including but not limited to an anti-LFA-1 antibody, an anti-E/L selectin antibody, a small molecule inhibitor), an anti-cytokine antibody or functional fragment thereof (including but not limited to an anti-IL-18, an anti-TNF, and an anti-IL-6/cytokine receptor antibody), methotrexate, cyclosporin, rapamycin, FK506, a detectable label or reporter, a TNF antagonist, an antirheumatic, a muscle relaxant, a narcotic, a non-steroid anti-inflammatory drug (NSAID), an analgesic, an anesthetic, a sedative, a local anesthetic, a neuromuscular blocker, an antimicrobial, an antipsoriatic, a corticosteriod, an anabolic steroid, an erythropoietin, an immunization, an immunoglobulin, an immunosuppressive, a growth hormone, a hormone replacement drug, a radiopharmaceutical, an antidepressant, an antipsychotic, a stimulant, an asthma medication, a beta agonist, an inhaled steroid, an epinephrine or analog, a cytokine, or a cytokine antagonist.

### Preparation of Binding Proteins

[0063] In another aspect, the disclosure provides a method of making the binding proteins disclosed herein. In an embodiment, the method of making a binding protein comprises the steps of a) obtaining a binding protein comprising an IgG constant region and determining the nucleic acid sequence encoding the heavy and light chains of the binding protein; b) inserting a sequence encoding an MH2 or EH2, or a modified MH2 or EH2 sequence, in place of an IgG CH1 and C kappa or C lambda domain in the nucleic acids encoding the heavy and light chains; c) preparing construct(s) containing the modified nucleic acid sequences and the original nucleic acid sequences, and inserting them in a host cell; and d) expressing the nucleic acids such that a binding protein is generated.

[0064] One or more isolated nucleic acids encoding any one of the binding proteins disclosed herein is also provided. A further embodiment provides a vector or vectors comprising the isolated nucleic acid disclosed herein. In an embodiment, the vector(s) is/are one or more of pcDNA; pTT; pTT3 (pTT with additional multiple cloning site); pEFBOS; pBV; pJV; pcDNA3.1 TOPO; pEF6 TOPO; pBOS; pHybE; and pBJ. In an embodiment, the vector is a vector disclosed in U.S. Pat. No. 7,612,181.

[0065] In an embodiment, a host cell is disclosed, wherein the host cell is transformed with a vector or vectors disclosed herein. In an embodiment, the host cell is a prokaryotic cell, for example, E. coli. In another embodiment, the host cell is a eukaryotic cell, for example, a protist cell, an animal cell, a plant cell, or a fungal cell. In an embodiment, the host cell is a mammalian cell including, but not limited to, CHO, COS, NS0, SP2, PER.C6, or a fungal cell, such as Saccharomyces cerevisiae, or an insect cell, such as Sf9. In an embodiment, two or more binding proteins, e.g., with different specificities, are produced in a single recombinant host cell. For example, the expression of a mixture of antibodies has been called Oligoclonics™ (Merus B. V., The Netherlands) U.S. Pat. Nos. 7,262,028 and 7,429,486.

[0066] A method of producing a binding protein is disclosed herein, comprising culturing any one of the host cells disclosed herein in a culture medium under conditions sufficient to produce the binding protein. In an embodiment, 50%-100% of the binding protein produced by this method exhibits the correct multispecific pairing of a binding protein disclosed herein (e.g., 50-100%, 50-90%, 75%-90%, 75-100%, 80-100%, 90-100%, 91-100%, 92-100%, 93-100%, 94-100%, 95-100%, 96-100%, 97-100%, 98-100%, 99-100%, or any percentage in between.

### Use of Disclosed Binding Proteins in Treating Various Diseases

[0067] In various embodiments, the binding proteins provided herein may be used as therapeutic molecules to treat various diseases, e.g., wherein the targets that are recognized by the binding proteins are detrimental. Such binding proteins may bind one or more targets involved in a specific disease. In an embodiment, the method comprises administering a binding protein disclosed herein to a subject in need thereof.

[0068] In an embodiment, a method for treating a mammal is provided, comprising the step of administering to the mammal an effective amount of a composition disclosed herein (e.g., a binding protein or a pharmaceutical composition comprising the binding protein.

[0069] The binding proteins provided herein can be used to treat humans suffering from autoimmune diseases such as, for example, those associated with inflammation. In an embodiment, the binding proteins provided herein are used to treat asthma, allergies, allergic lung disease, allergic rhinitis, atopic dermatitis, inflammatory pustular skin disease, Behcet's disease, Systemic Juvenile Idiopathic Arthritis, Familial Mediterranean Fever, Neonatal Onset Multisystem Inflammatory disease, acute heart failure, post-infarction remodeling, pulmonary hypertension, type 1 diabetes, proliferative Diabetic Retinopathy, Congenital Hyperinsulinism, Schnitzler Syndrome, gout flares, pyoderma gangrenosum, chronic obstructive pulmonary disease (COPD), fibrosis, cystic fibrosis (CF), fibrotic lung disease, idiopathic pulmonary fibrosis, liver fibrosis, lupus, hepatitis B-related liver diseases and fibrosis, sepsis, systemic lupus erythematosus (SLE), glomerulonephritis, inflammatory skin diseases, psoriasis, diabetes, insulin dependent diabetes mellitus, infectious diseases caused by HIV, inflammatory bowel disease (IBD), ulcerative colitis (UC), Crohn's disease (CD), rheumatoid arthritis (RA), osteoarthritis (OA), multiple sclerosis (MS), graft-versus-host disease (GVHD), transplant rejection, ischemic heart disease (IHD), celiac disease, contact hypersensitivity, alcoholic liver disease, Behcet's disease, atherosclerotic vascular disease, ocular surface inflammatory diseases, or Lyme disease.

[0070] In another embodiment, the disorder or condition to be treated comprises a viral infection and/or the symptoms caused by viral infection in a human, for example, HIV, the human rhinovirus, an enterovirus, a coronavirus, a herpes virus, an influenza virus, a parainfluenza virus, a respiratory syncytial virus or an adenovirus.

[0071] The binding proteins provided herein can be used to treat neurological disorders. In an embodiment, the binding proteins provided herein are used to treat neurodegenerative diseases and conditions involving neuronal regeneration and spinal cord injury.

[0072] In an embodiment, diseases that can be treated or diagnosed with the compositions and methods disclosed herein include, but are not limited to, primary and metastatic cancers, including carcinomas of breast, colon, rectum, lung, oropharynx, hypopharynx, esophagus, stomach, pancreas, liver, gallbladder and bile ducts, small intestine, urinary tract (including kidney, bladder and urothelium), female genital tract (including cervix, uterus, and ovaries as well as choriocarcinoma and gestational trophoblastic disease), male genital tract (including prostate, seminal vesicles, testes and germ cell tumors), endocrine glands (including the thyroid, adrenal, and pituitary glands), and skin, as well as hemangiomas, melanomas, sarcomas (including those arising from bone and soft tissues as well as Kaposi's sarcoma), tumors of the brain, nerves, eyes, and meninges (including astrocytomas, gliomas, glioblastomas, retinoblastomas, neuromas, neuroblastomas, Schwannomas, and meningiomas), solid tumors arising from hematopoietic malignancies such as leukemias, and lymphomas (both Hodgkin's and non-Hodgkin's lymphomas).

[0073] Another embodiment provides for the use of the binding protein in the diagnosis or treatment of a disease or disorder, wherein the disease or disorder is rheumatoid arthritis, osteoarthritis, juvenile chronic arthritis, septic arthritis, Lyme arthritis, psoriatic arthritis, reactive arthritis, spondyloarthropathy, systemic lupus erythematosus, Crohn's disease, ulcerative colitis, inflammatory bowel disease, insulin dependent diabetes mellitus, thyroiditis, asthma, allergic diseases, psoriasis, dermatitis scleroderma, graft versus host disease, organ transplant rejection, acute or chronic immune disease associated with organ transplantation, sarcoidosis, atherosclerosis, disseminated intravascular coagulation, Kawasaki's disease, Grave's disease, nephrotic syndrome, chronic fatigue syndrome, Wegener's granulomatosis, Henoch-Schoenlein purpurea, microscopic vasculitis of the kidneys, chronic active hepatitis, uveitis, septic shock, toxic shock syndrome, sepsis syndrome, cachexia, infectious diseases, parasitic diseases, acquired immunodeficiency syndrome, acute transverse myelitis, Huntington's chorea, Parkinson's disease, Alzheimer's disease, stroke, primary biliary cirrhosis, hemolytic anemia, malignancies, heart failure, Addison's disease, sporadic, polyglandular deficiency type I and polyglandular deficiency type II, Schmidt's syndrome, adult (acute) respiratory distress syndrome, alopecia, alopecia areata, arthropathy, Reiter's disease, psoriatic arthropathy, ulcerative colitic arthropathy, enteropathic synovitis, chlamydia, Yersinia and salmonella associated arthropathy, athermanous disease/arteriosclerosis, atopic allergy, autoimmune bullous disease, pemphigus vulgaris, pemphigus foliaceus, pemphigoid, linear IgA disease, autoimmune haemolytic anaemia, Coombs positive haemolytic anaemia, acquired pernicious anaemia, juvenile pernicious anaemia, myalgic encephalitis/Royal Free Disease, chronic mucocutaneous candidiasis, giant cell arteritis, primary sclerosing hepatitis, cryptogenic autoimmune hepatitis, acquired immunodeficiency related diseases, hepatitis B, hepatitis C, common varied immunodeficiency (common variable hypogammaglobulinaemia), dilated cardiomyopathy, female infertility, ovarian failure, premature ovarian failure, fibrotic lung disease, cryptogenic fibrosing alveolitis, post-inflammatory interstitial lung disease, interstitial pneumonitis, connective tissue disease associated interstitial lung disease, mixed connective tissue disease associated lung disease, systemic sclerosis associated interstitial lung disease, rheumatoid arthritis associated interstitial lung disease, systemic lupus erythematosus associated lung disease, dermatomyositis/polymyositis associated lung disease, Sjögren's disease associated lung disease, ankylosing spondylitis associated lung disease, vasculitic diffuse lung disease, haemosiderosis associated lung disease, drug-induced interstitial lung disease, fibrosis, radiation fibrosis, bronchiolitis obliterans, chronic eosinophilic pneumonia, lymphocytic infiltrative lung disease, postinfectious interstitial lung disease, gouty arthritis, autoimmune hepatitis, type-1 autoimmune hepatitis (classical autoimmune or lupoid hepatitis), type-2 autoimmune hepatitis (anti-LKM antibody hepatitis), autoimmune mediated hypoglycaemia, type B insulin resistance with acanthosis nigricans, hypoparathyroidism, acute immune disease associated with organ transplantation, chronic immune disease associated with organ transplantation, osteoarthrosis, primary sclerosing cholangitis, psoriasis type 1, psoriasis type 2, idiopathic leucopaenia, autoimmune neutropaenia, renal disease NOS, glomerulonephritides, microscopic vasculitis of the kidneys, lyme disease, discoid lupus erythematosus, male infertility idiopathic or NOS, sperm autoimmunity, multiple sclerosis (all subtypes), sympathetic ophthalmia, pulmonary hypertension secondary to connective tissue disease, Goodpasture's syndrome, pulmonary manifestation of polyarteritis nodosa, acute rheumatic fever, rheumatoid spondylitis, Still's disease, systemic sclerosis, Sjögren's syndrome, Takayasu's disease/arteritis, autoimmune thrombocytopaenia, idiopathic thrombocytopaenia, autoimmune thyroid disease, hyperthyroidism, goitrous autoimmune hypothyroidism (Hashimoto's disease), atrophic autoimmune hypothyroidism, primary myxoedema, phacogenic uveitis, primary vasculitis, vitiligo acute liver disease, chronic liver diseases, alcoholic cirrhosis, alcohol-induced liver injury, cholestatis, idiosyncratic liver disease, drug-induced hepatitis, non-alcoholic steatohepatitis, allergy and asthma, group B streptococci (GBS) infection, mental disorders, depression, schizophrenia, Th2 Type and Th1 Type mediated diseases, acute and chronic pain, different forms of pain, cancers, lung cancer, breast cancer, stomach cancer, bladder cancer, colon cancer, pancreatic cancer, ovarian cancer, prostate cancer, rectal cancer, hematopoietic malignancies, leukemia, lymphoma, Abetalipoprotemia, acrocyanosis, acute and chronic parasitic or infectious processes, acute leukemia, acute lymphoblastic leukemia (ALL), acute myeloid leukemia (AML), acute or chronic bacterial infection, acute pancreatitis, acute renal failure, adenocarcinomas, aerial ectopic beats, AIDS dementia complex, alcohol-induced hepatitis, allergic conjunctivitis, allergic contact dermatitis, allergic rhinitis, allograft rejection, alpha-1-antitrypsin deficiency, amyotrophic lateral sclerosis, anemia, angina pectoris, anterior horn cell degeneration, anti cd3 therapy, antiphospholipid syndrome, anti-receptor hypersensitivity reactions, aortic and peripheral aneuryisms, aortic dissection, arterial hypertension, arteriosclerosis, arteriovenous fistula, ataxia, atrial fibrillation (sustained or paroxysmal), atrial flutter, atrioventricular block, B cell lymphoma, bone graft rejection, bone marrow transplant (BMT) rejection, bundle branch block, Burkitt's lymphoma, burns, cardiac arrhythmias, cardiac stun syndrome, cardiac tumors, cardiomyopathy, cardiopulmonary bypass inflammation response, cartilage transplant rejection, cerebellar cortical degenerations, cerebellar disorders, chaotic or multifocal atrial tachycardia, chemotherapy associated disorders, chronic myelocytic leukemia (CML), chronic alcoholism, chronic inflammatory pathologies, chronic lymphocytic leukemia (CLL), chronic obstructive pulmonary disease (COPD), chronic salicylate intoxication, colorectal carcinoma, congestive heart failure, conjunctivitis, contact dermatitis, cor pulmonale, coronary artery disease, Creutzfeldt-Jakob disease, culture negative sepsis, cystic fibrosis, cytokine therapy associated disorders, dementia pugilistica, demyelinating diseases, dengue hemorrhagic fever, dermatitis, dermatologic conditions, diabetes, diabetes mellitus, diabetic ateriosclerotic disease, diffuse Lewy body disease, dilated congestive cardiomyopathy, disorders of the basal ganglia, Down's syndrome in middle age, drug-induced movement disorders induced by drugs which block CNS dopamine receptors, drug sensitivity, eczema, encephalomyelitis, endocarditis, endocrinopathy, epiglottitis, Epstein-Barr virus infection, erythromelalgia, extrapyramidal and cerebellar disorders, familial hematophagocytic lymphohistiocytosis, fetal thymus implant rejection, Friedreich's ataxia, functional peripheral arterial disorders, fungal sepsis, gas gangrene, gastric ulcer, glomerular nephritis, graft rejection of any organ or tissue, gram negative sepsis, gram positive sepsis, granulomas due to intracellular organisms, hairy cell leukemia, Hallervorden-Spatz disease, Hashimoto's thyroiditis, hay fever, heart transplant rejection, hemachromatosis, hemodialysis, hemolytic uremic syndrome/thrombolytic thrombocytopenic purpura, hemorrhage, hepatitis A, His bundle arrythmias, HIV infection/HIV neuropathy, Hodgkin's disease, hyperkinetic movement disorders, hypersensitivity reactions, hypersensitivity pneumonitis, hypertension, hypokinetic movement disorders, hypothalamic-pituitary-adrenal axis evaluation, idiopathic Addison's disease, idiopathic pulmonary fibrosis, antibody mediated cytotoxicity, Asthenia, infantile spinal muscular atrophy, inflammation of the aorta, influenza a, ionizing radiation exposure, iridocyclitis/uveitis/optic neuritis, ischemia-reperfusion injury, ischemic stroke, juvenile rheumatoid arthritis, juvenile spinal muscular atrophy, Kaposi's sarcoma, kidney transplant rejection, legionella, leishmaniasis, leprosy, lesions of the corticospinal system, lipedema, liver transplant rejection, lymphederma, malaria, malignant lymphoma, malignant histiocytosis, malignant melanoma, meningitis, meningococcemia, metabolic/idiopathic, migraine headache, mitochondrial multisystem disorder, mixed connective tissue disease, monoclonal gammopathy, multiple myeloma, multiple systems degenerations (Mencel Dejerine-Thomas Shi-Drager and Machado-Joseph), mycobacterium avium intracellulare, mycobacterium tuberculosis, my elodyplastic syndrome, myocardial infarction, myocardial ischemic disorders, nasopharyngeal carcinoma, neonatal chronic lung disease, nephritis, nephrosis, neurodegenerative diseases, neurogenic muscular atrophies, neutropenic fever, non-Hodgkins lymphoma, occlusion of the abdominal aorta and its branches, occlusive arterial disorders, okt3 therapy, orchitis/epidydimitis, orchitis/vasectomy reversal procedures, organomegaly, osteoporosis, pancreas transplant rejection, pancreatic carcinoma, paraneoplastic syndrome/hypercalcemia of malignancy, parathyroid transplant rejection, pelvic inflammatory disease, perennial rhinitis, pericardial disease, peripheral atherlosclerotic disease, peripheral vascular disorders, peritonitis, pernicious anemia, pneumocystis carinii pneumonia, pneumonia, POEMS syndrome (polyneuropathy, organomegaly, endocrinopathy, monoclonal gammopathy, and skin changes syndrome), post perfusion syndrome, post pump syndrome, post-MI cardiotomy syndrome, preeclampsia, progressive supranucleo palsy, primary pulmonary hypertension, radiation therapy, Raynaud's phenomenon and disease, Raynoud's disease, Refsum's disease, regular narrow QRS tachycardia, renovascular hypertension, reperfusion injury, restrictive cardiomyopathy, sarcomas, scleroderma, senile chorea, senile dementia of Lewy body type, seronegative arthropathies, shock, sickle cell anemia, skin allograft rejection, skin changes syndrome, small bowel transplant rejection, solid tumors, specific arrhythmias, spinal ataxia, spinocerebellar degenerations, streptococcal myositis, structural lesions of the cerebellum, subacute sclerosing panencephalitis, syncope, syphilis of the cardiovascular system, systemic anaphalaxis, systemic inflammatory response syndrome, systemic onset juvenile rheumatoid arthritis, T-cell or FAB ALL telangiectasia, thromboangitis obliterans, thrombocytopenia, toxicity, transplants, trauma/hemorrhage, type III hypersensitivity reactions, type IV hypersensitivity, unstable angina, uremia, urosepsis, valvular heart diseases, varicose veins, vasculitis, venous diseases, venous thrombosis, ventricular fibrillation, viral and fungal infections, vital encephalitis/aseptic meningitis, vital-associated hemaphagocytic syndrome, Wernicke-Korsakoff syndrome, Wilson's disease, xenograft rejection of any organ or tissue, acute coronary syndromes, acute idiopathic polyneuritis, acute inflammatory demyelinating polyradiculoneuropathy, acute ischemia, adult Still's disease, anaphylaxis, anti-phospholipid antibody syndrome, aplastic anemia, atopic eczema, atopic dermatitis, autoimmune dermatitis, autoimmune disorder associated with streptococcus infection, autoimmune enteropathy, autoimmune hearing loss, autoimmune lymphoproliferative syndrome (ALPS), autoimmune myocarditis, autoimmune premature ovarian failure, blepharitis, bronchiectasis, bullous pemphigoid, cardiovascular disease, catastrophic antiphospholipid syndrome, celiac disease, cervical spondylosis, chronic ischemia, cicatricial pemphigoid, clinically isolated syndrome (cis) with risk for multiple sclerosis, childhood onset psychiatric disorder, dacryocystitis, dermatomyositis, diabetic retinopathy, disk herniation, disk prolaps, drug induced immune hemolytic anemia, endometriosis, endophthalmitis, episcleritis, erythema multiforme, erythema multiforme major, gestational pemphigoid, Guillain-Barré syndrome (GBS), Hughes syndrome, idiopathic Parkinson's disease, idiopathic interstitial pneumonia, IgE-mediated allergy, immune hemolytic anemia, inclusion body myositis, infectious ocular inflammatory disease, inflammatory demyelinating disease, inflammatory heart disease, inflammatory kidney disease, IPF/UIP, iritis, keratitis, keratojuntivitis sicca, Kussmaul disease or Kussmaul-Meier disease, Landry's paralysis, Langerhan's cell histiocytosis, livedo reticularis, macular degeneration, microscopic polyangiitis, morbus bechterev, motor neuron disorders, mucous membrane pemphigoid, multiple organ failure, myasthenia gravis, myelodysplastic syndrome, myocarditis, nerve root disorders, neuropathy, non-A non-B hepatitis, optic neuritis, osteolysis, pauciarticular JRA, peripheral artery occlusive disease (PAOD), peripheral vascular disease (PVD), peripheral artery, disease (PAD), phlebitis, polyarteritis nodosa (or periarteritis nodosa), polychondritis, poliosis, polyarticular JRA, polyendocrine deficiency syndrome, polymyositis, polymyalgia rheumatica (PMR), primary Parkinsonism, prostatitis, pure red cell aplasia, primary adrenal insufficiency, recurrent neuromyelitis optica, restenosis, rheumatic heart disease, sapho (synovitis, acne, pustulosis, hyperostosis, and osteitis), secondary amyloidosis, shock lung, scleritis, sciatica, secondary adrenal insufficiency, silicone associated connective tissue disease, Sneddon-Wilkinson dermatosis, spondilitis ankylosans, Stevens-Johnson syndrome (SJS), temporal arteritis, toxoplasmic retinitis, toxic epidermal necrolysis, transverse myelitis, TRAPS (tumor necrosis factor receptor, type 1 allergic reaction, type II diabetes, urticaria, usual interstitial pneumonia (UIP), vasculitis, vernal conjunctivitis, viral retinitis, Vogt-Koyanagi-Harada syndrome (VKH syndrome), wet macular degeneration, or wound healing. In some embodiments, any one or a combination of the binding proteins disclosed herein can be used to diagnose or treat a disorder listed above.

[0074] Also disclosed herein are methods of determining the presence, amount or concentration of one or more antigen targets, or fragment thereof, in a test sample. In some embodiments, the method comprises assaying the test sample for the antigen, or fragment thereof, by an immunoassay. The immunoassay (i) employs at least one binding protein and at least one detectable label and (ii) comprises comparing a signal generated by the detectable label as a direct or indirect indication of the presence, amount or concentration of the antigen, or fragment thereof, in the test sample to a signal generated as a direct or indirect indication of the presence, amount or concentration of the antigen, or fragment thereof, in a control or a calibrator. The calibrator is optionally part of a series of calibrators in which each of the calibrators differs from the other calibrators in the series by the concentration of the antigen, or fragment thereof. The method can comprise (i) contacting the test sample with at least one capture agent, which binds to an epitope on the antigen, or fragment thereof, so as to form a capture agent/antigen, or fragment thereof, complex, (ii) contacting the capture agent/antigen, or fragment thereof, complex with at least one detection agent, which comprises a detectable label and binds to an epitope on the antigen, or fragment thereof, that is not bound by the capture agent, to form a capture agent/antigen, or fragment thereof/detection agent complex, and (iii) determining the presence, amount or concentration of the antigen, or fragment thereof, in the test sample based on the signal generated by the detectable label in the capture agent/antigen, or fragment thereof/detection agent complex formed in (ii), wherein at least one capture agent and/or at least one detection agent is the at least one binding protein.

[0075] Alternatively, the method can comprise (i) contacting the test sample with at least one capture agent, which binds to an epitope on the antigen, or fragment thereof, so as to form a capture agent/antigen, or fragment thereof, complex, and simultaneously or sequentially, in either order, contacting the test sample with detectably labeled antigen, or fragment thereof, which can compete with any antigen, or fragment thereof, in the test sample for binding to the at least one capture agent, wherein any antigen, or fragment thereof, present in the test sample and the detectably labeled antigen compete with each other to form a capture agent/antigen, or fragment thereof, complex and a capture agent/detectably labeled antigen, or fragment thereof, complex, respectively, and (ii) determining the presence, amount or concentration of the antigen, or fragment thereof, in the test sample based on the signal generated by the detectable label in the capture agent/detectably labeled antigen, or fragment thereof, complex formed in (ii), wherein at least one capture agent is the at least one binding protein and wherein the signal generated by the detectable label in the capture agent/detectably labeled antigen, or fragment thereof, complex is inversely proportional to the amount or concentration of antigen, or fragment thereof, in the test sample.

[0076] The test sample can be from a patient, in which case the method can further comprise diagnosing, prognosticating, or assessing the efficacy of therapeutic/prophylactic treatment of the patient. If the method further comprises assessing the efficacy of therapeutic/prophylactic treatment of the patient, the method optionally further comprises modifying the therapeutic/prophylactic treatment of the patient as needed to improve efficacy. The method can be adapted for use in an automated system or a semi-automated system. Accordingly, the methods described herein also can be used to determine whether or not a subject has or is at risk of developing a given disease, disorder or condition. Specifically, such a method can comprise the steps of:
[0077] (a) determining the concentration or amount in a test sample from a subject of analyte, or fragment thereof, (e.g., using the methods described herein, or methods known in the art); and
[0078] (b) comparing the concentration or amount of analyte, or fragment thereof, determined in step (a) with a predetermined level, wherein, if the concentration or amount of analyte determined in step (a) is favorable with respect to a predetermined level, then the subject is determined not to have or be at risk for a given disease, disorder or condition.
   However, if the concentration or amount of analyte determined in step (a) is unfavorable with respect to the predetermined level, then the subject is determined to have or be at risk for a given disease, disorder or condition.

[0079] Additionally, provided herein is method of monitoring the progression of disease in a subject. Optimally the method comprising the steps of: (a) determining the concentration or amount in a test sample from a subject of analyte; (b) determining the concentration or amount in a later test sample from the subject of analyte; and (c) comparing the concentration or amount of analyte as determined in step (b) with the concentration or amount of analyte determined in step (a), wherein if the concentration or amount determined in step (b) is unchanged or is unfavorable when compared to the concentration or amount of analyte determined in step (a), then the disease in the subject is determined to have continued, progressed or worsened. By comparison, if the concentration or amount of analyte as determined in step (b) is favorable when compared to the concentration or amount of analyte as determined in step (a), then the disease in the subject is determined to have discontinued, regressed or improved.

[0080] Optionally, the method further comprises comparing the concentration or amount of analyte as determined in step (b), for example, with a predetermined level. Further, optionally the method comprises treating the subject with one or more pharmaceutical compositions for a period of time if the comparison shows that the concentration or amount of analyte as determined in step (b), for example, is unfavorably altered with respect to the predetermined level.

[0081] Also provided is a kit for assaying a test sample for one or more antigen targets, or fragments thereof. The kit comprises at least one component for assaying the test sample for an antigen, or fragment thereof, and instructions for assaying the test sample for an antigen, or fragment thereof, wherein the at least one component includes at least one composition comprising the binding protein disclosed herein, wherein the binding protein is optionally detectably labeled.

[0082] Unless otherwise defined herein, scientific and technical terms used herein have the meanings that are commonly understood by those of ordinary skill in the art. In the event of any latent ambiguity, definitions provided herein take precedent over any dictionary or extrinsic definition. Unless otherwise required by context, singular terms shall include pluralities and plural terms shall include the singular. The use of “or” means “and/or” unless stated otherwise. The use of the term “including,” as well as other forms, such as “includes” and “included,” are not limiting. Any range disclosed herein is intended to encompass the endpoints of that range unless stated otherwise.

[0083] Generally, nomenclatures used in connection with cell and tissue culture, molecular biology, immunology, microbiology, genetics and protein and nucleic acid chemistry and hybridization described herein are those known and commonly used in the art. The methods and techniques provided herein are generally performed according to conventional methods well known in the art and as described in various general and more specific references that are cited and discussed throughout the present specification unless otherwise indicated. Enzymatic reactions and purification techniques are performed according to manufacturer's specifications, as commonly accomplished in the art or as described herein. The nomenclatures used in connection with, and the laboratory procedures and techniques of, analytical chemistry, synthetic organic chemistry, and medicinal and pharmaceutical chemistry described herein are those well-known and commonly used in the art. Standard techniques are used for chemical syntheses, chemical analyses, pharmaceutical preparation, formulation, and delivery, and treatment of patients.

[0084] That the disclosure may be more readily understood, select terms are defined below.

[0085] The term “antibody” refers to an immunoglobulin (Ig) molecule, which is may comprise four polypeptide chains, two heavy (H) chains and two light (L) chains, or it may comprise a functional fragment (such as a half body), mutant, variant, or derivative thereof, that retains the epitope binding features of an Ig molecule. Such fragment, mutant, variant, or derivative antibody formats are known in the art. In an embodiment of a full-length antibody, each heavy chain is comprised of a heavy chain variable region (VH) and a heavy chain constant region (CH). In the case of an IgG molecule, the CH comprises three domains, CH1, CH2 and CH3 (prior to the modifications disclosed herein). Each light chain is comprised of a light chain variable region (VL) and a light chain constant region (CL). The CL is comprised of a single CL domain. The VH and VL can be further subdivided into regions of hypervariability, termed complementarity determining regions (CDRs), interspersed with regions that are more conserved, termed framework regions (FRs). Generally, each VH and VL is composed of three CDRs and four FRs, arranged from amino-terminus to carboxy-terminus in the following order: FR1, CDR1, FR2, CDR2, FR3, CDR3, and FR4. CDR regions may be determined by standard methods, e.g., those of Kabat et al. Immunoglobulin molecules can be of any type (e.g., IgG, IgE, IgM, IgD, IgA and IgY), class (e.g., IgG1, IgG2, IgG3, IgG4, IgA1 and IgA2), or subclass. An antibody is a type of binding protein.

[0086] The term “multispecific” binding protein refer to binding proteins that have binding specificities for at least two different antigens. Traditionally, the recombinant production of multispecific antibodies is based on the co-expression of two immunoglobulin heavy chain-light chain pairs, where the two heavy chains have different specificities (Milstein et al. (1983) Nature 305: 537). Similar procedures are disclosed, e.g., in PCT Publication Nos. WO 93/08829, WO 91/00360, and WO 92/00373; U.S. Pat. Nos. 6,210,668; 6,193,967; 6,132,992; 6,106,833; 6,060,285; 6,037,453; 6,010,902; 5,989,530; 5,959,084; 5,959,083; 5,932,448; 5,833,985; 5,821,333; 5,807,706; 5,643,759, 5,601,819; 5,582,996, 5,496,549, and 4,676,980; Traunecker et al. (1991) EMBO J. 10: 3655; and Suresh et al. (1986) Methods in Enzymol. 121: 210; incorporated herein by reference.

[0087] The term “bispecific” antibody or binding protein refers to an antibody or binding protein that binds one antigen (or epitope) on one of its two binding arms (one pair of HC/LC), and binds a different antigen (or epitope) on its second binding arm (a different pair of HC/LC). A bispecific antibody is a type of bispecific binding protein. A bispecific antibody may have two distinct antigen binding arms (in both specificity and CDR sequences), and may be monovalent for each antigen to which it binds. Bispecific antibodies include those generated by quadroma technology (Milstein and Cuello (1983) Nature 305(5934): 537-40), by chemical conjugation of two different monoclonal antibodies (Staerz et al. (1985) Nature 314(6012): 628-31), or by knob-into-hole or similar approaches which introduces mutations in the Fc region (Holliger et al. (1993) Proc. Natl. Acad. Sci. USA 90(14): 6444-6448).

[0088] The term “affinity matured” refers to an antibody or binding protein with one or more alterations in one or more CDR or framework (FR) regions thereof, which may result in an improvement in the affinity for an antigen, compared to a parent antibody or binding protein which does not possess those alteration(s). Exemplary affinity matured antibodies or binding protein will have nanomolar or even picomolar affinities for the target antigen. Affinity matured antibodies or binding protein may be produced by procedures known in the art, e.g., Marks et al. (1992) BioTechnology 10: 779-783 describes affinity maturation by VH and VL domain shuffling. Random mutagenesis of CDR and/or framework residues is described by Barbas et al. (1994) Proc. Nat. Acad. Sci. USA 91:3809-3813; Schier et al. (1995) Gene 169: 147-155; Yelton et al. (1995) J. Immunol. 155: 1994-2004; Jackson et al. (1995) J. Immunol. 154(7): 3310-9; Hawkins et al. (1992) J. Mol. Biol. 226: 889-896 and mutation at selective mutagenesis positions, contact or hypermutation positions with an activity enhancing amino acid residue as described in U.S. Pat. No. 6,914,128.

[0089] The term “CDR-grafted” refers to an antibody or binding protein that comprises heavy and light chain variable region sequences in which the sequences of one or more of the CDR regions of the VH and/or VL domains are replaced with CDR sequences of another antibody or binding protein. For example, the two antibodies or binding protein can be from different species, such as antibodies or binding protein having murine heavy and light chain variable regions in which one or more of the murine CDRs has been replaced with human CDR sequences.

[0090] The term “humanized” refers to an antibody or binding protein from a non-human species that has been altered to be more “human-like”, i.e., more similar to human germline sequences. One type of humanized antibody or binding protein is a CDR-grafted antibody or binding protein, in which non-human CDR sequences are introduced into human VH and VL sequences to replace the corresponding human CDR sequences. A humanized antibody or binding protein also encompasses a variant, derivative, analog or fragment of an antibody or binding protein that comprises framework region (FR) sequences having substantially (e.g., at least 80%, at least 85%, at least 90%, at least 95%, at least 98% or at least 99% identity to) the amino acid sequence of a human antibody and at least one CDR having substantially the amino acid sequence of a non-human antibody. A humanized antibody or binding protein may comprise substantially all of at least one variable domain (Fab, Fab′, F(ab′)₂, Fv) in which the sequence of all or substantially all of the CDR regions correspond to those of a non-human immunoglobulin (i.e., donor antibody) and the sequence of all or substantially all of the FR regions are those of a human immunoglobulin. The humanized antibody or binding protein also may include the CH1, hinge, CH2, CH3, and/or CH4 regions of the heavy chain. In an embodiment, a humanized antibody or binding protein may also comprise at least a portion of a human immunoglobulin Fc region. In some embodiments, a humanized antibody or binding protein only contains a humanized light chain. In some embodiments, a humanized antibody or binding protein only contains a humanized heavy chain. In some embodiments, a humanized antibody or binding protein only contains a humanized variable domain of a light chain and/or humanized variable domain of a heavy chain. In some embodiments, a humanized antibody or binding protein contains a humanized light chain as well as at least a variable domain of a heavy chain. In some embodiments, a humanized antibody or binding protein contains a humanized heavy chain as well as at least a variable domain of a light chain.

[0091] The term “protuberance” in some embodiments refers to one or more amino acid modifications to increase the bulk (e.g., the total volume) taken up by the amino acids. For instance, smaller amino acids can be modified or replaced by those having larger side chains which projects from the interface of the first polypeptide chain (heavy or light chain) and can therefore be positioned in a related cavity in the adjacent second polypeptide chain (light or heavy) so as to stabilize the heterodimer, and thereby favor heterodimer formation over homodimer formation. The protuberance may exist in the original interface or may be introduced synthetically (e.g., by altering one or more nucleic acid encoding the amino acid(s) at the interface). In some embodiments, a protuberance is introduced by modifying the nucleic acid encoding at least one “original” amino acid residue in the interface of the first polypeptide with a nucleic acid encoding at least one “engineered” amino acid residue which has a larger side chain volume than the original amino acid residue. It will be appreciated that there can be more than one original and corresponding engineered residue. The upper limit for the number of original residues which are replaced is the total number of residues in the interface of the first polypeptide. In some embodiments, a protuberance is referred to as a “knob.”

[0092] A “cavity” refers to at least one amino acid side chain which is recessed from the interface of the first or second polypeptide chain (heavy or light chain) and therefore accommodates a corresponding protuberance on the adjacent second polypeptide chain (light or heavy). The cavity may exist in the original interface or may be introduced synthetically (e.g., by altering one or more nucleic acid encoding the amino acid(s) at the interface). In some embodiments, a protuberance is introduced by modifying the nucleic acid encoding at least one “original” amino acid residue in the interface of the first polypeptide with a nucleic acid encoding at least one “engineered” amino acid residue which has a smaller side chain volume than the original amino acid residue. It will be appreciated that there can be more than one original and corresponding engineered residue. The upper limit for the number of original residues which are replaced is the total number of residues in the interface of the first polypeptide. In some embodiments, a cavity is referred to as a “hole.”

[0093] The “interface” between a first and second polypeptide chain can comprise those amino acid residues (or other non-amino acid groups such as carbohydrate groups, NADH, biotin, FAD or haem group) in contact and/or which interact between the first polypeptide chain (heavy or light chain) and the counterpart second polypeptide chain (light or heavy chain). The interaction can be covalent, non-covalent (e.g., ionic) or other interaction. In some embodiments, amino acids on the first and second polypeptide chains that are within 5 Angstroms of each other are considered part of the interface.

[0094] The term “biological activity” refers to any one or more biological properties of a molecule (whether present naturally as found in vivo, or provided or enabled by recombinant means). Biological properties include, but are not limited to, binding a receptor, inducing cell proliferation, inhibiting cell growth, inducing other cytokines, inducing apoptosis, and enzymatic activity.

[0095] The term “neutralizing” refers to counteracting the biological activity of an antigen when a binding protein specifically binds to the antigen. In an embodiment, a neutralizing binding protein binds to an antigen and reduces the antigen's biological activity by at least about 20%, about 40%, about 60%, about 80%, about 85%, about 90%, about 95%, or about 100% (or any percentage in between).

[0096] The term “specificity” refers to the ability of a binding protein to selectively bind an antigen.

[0097] The term “affinity” refers to the strength of the interaction between a binding protein and an antigen, and is determined by the sequence of the CDRs of the binding protein as well as by the nature of the antigen, such as its size, shape, and/or charge. Binding proteins may be selected for affinities that provide desired therapeutic end-points while minimizing negative side-effects. Affinity may be measured using methods known to one skilled in the art (see, e.g., U.S. Pat. No. 7,612,181).

[0098] The term “potency” refers to the ability of a binding protein to achieve a desired effect, and is a measurement of its therapeutic efficacy. Potency may be assessed using methods known to one skilled in the art (see, e.g., U.S. Pat. No. 7,612,181).

[0099] The term “cross-reactivity” refers to the ability of a binding protein to bind a target other than that against which it was raised. Generally, a binding protein will bind its target tissue(s)/antigen(s) with an appropriately high affinity, but will display an appropriately low affinity for non-target normal tissues. Methods of assessing cross-reactivity are known to one skilled in the art (see, e.g., U.S. Pat. No. 7,612,181).

[0100] The term “competitive binding” refers to the ability of a binding protein to compete for binding to a target with a reference binding protein and therefore reduce the binding of the reference binding protein to the target. In certain embodiments, competitive binding can be evaluated using routine cross-blocking assays, such as the assay described in ANTIBODIES, A LABORATORY MANUAL, Cold Spring Harbor Laboratory, Ed Harlow and David Lane (1st edition 1988, 2nd edition 2014). In some embodiments, competitive binding is identified when a test antibody or binding protein reduces binding of a reference antibody or binding protein disclosed herein by at least about 50% in the cross-blocking assay (e.g., 50%, 60%, 70%, 80%, 90%, 95%, 99%, 99.5%, or more, or any percentage in between), and/or vice versa. In some embodiments, competitive binding can be due to shared or similar (e.g., partially overlapping) epitopes, or due to steric hindrance where antibodies or binding proteins bind at nearby epitopes. See, e.g., Tzartos, Methods in Molecular Biology, vol. 66, Epitope Mapping Protocols, pages 55-66, Humana Press Inc. (1998) (“only marked mutual crosscompetition should be taken as unequivocal evidence of overlapping epitopes, since weak or one-way inhibition may simply reflect a decrease in affinity owing to steric or allosteric effects. Therefore, we completely ignored cases of weak inhibition (<25%) and essentially only considered inhibition of >50%”). In some embodiments, competitive binding can be used to sort groups of binding proteins that share similar epitopes, e.g., those that compete for binding can be “binned” as a group of binding proteins that have overlapping or nearby epitopes, while those that do not compete are placed in a separate group of binding proteins that do not have overlapping or nearby epitopes.

[0101] The term “biological function” refers the specific in vitro or in vivo actions of a binding protein. Binding proteins may target several classes of antigens and achieve desired therapeutic outcomes through multiple mechanisms of action. Binding proteins may target soluble proteins, cell surface antigens, as well as extracellular protein deposits. Binding proteins may agonize, antagonize, or neutralize the activity of their targets. Binding proteins may assist in the clearance of the targets to which they bind, or may result in cytotoxicity when bound to cells.

[0102] Portions of two or more antibodies may be incorporated into a multivalent format to achieve distinct functions in a single binding protein molecule. The in vitro assays and in vivo models used to assess biological function are known to one skilled in the art (see, e.g., U.S. Pat. No. 7,612,181).

[0103] A “stable” binding protein refers to one in which the binding protein retains some level of its physical stability, chemical stability and/or biological activity upon storage. Methods of stabilizing binding proteins and assessing their stability at various temperatures are known to one skilled in the art (see, e.g., U.S. Pat. No. 7,612,181).

[0104] The term “solubility” refers to the ability of a protein to remain dispersed within an aqueous solution. The solubility of a protein in an aqueous formulation depends upon the proper distribution of hydrophobic and hydrophilic amino acid residues, and therefore, solubility can correlate with the production of correctly folded proteins. A person skilled in the art will be able to detect an increase or decrease in solubility of a binding protein using routine HPLC techniques and methods known to one skilled in the art (see, e.g., U.S. Pat. No. 7,612,181).

[0105] Binding proteins may be produced using a variety of host cells or may be produced in vitro, and the relative yield per effort determines the “production efficiency.” Factors influencing production efficiency include, but are not limited to, host cell type (prokaryotic or eukaryotic), choice of expression vector, choice of nucleotide sequence, and methods employed. The materials and methods used in binding protein production, as well as the measurement of production efficiency, are known to one skilled in the art (see, e.g., U.S. Pat. No. 7,612,181).

[0106] The term “immunogenicity” means the ability of a substance to induce an immune response. Administration of a therapeutic binding protein may result in a certain incidence of an immune response. Potential elements that might induce immunogenicity in a multivalent format may be analyzed during selection of the parental antibodies, and steps to reduce such risk can be taken to optimize the parental antibodies prior to incorporating their sequences into a multivalent binding protein format. Methods of reducing the immunogenicity of antibodies and binding proteins are known to one skilled in the art (U.S. Pat. No. 7,612,181).

[0107] The terms “label” and “detectable label” refer to a moiety attached to a member of a specific binding pair, such as an antibody/binding protein or its analyte to render a reaction (e.g., binding) between the members of the specific binding pair, detectable. The labeled member of the specific binding pair is referred to as “detectably labeled.” Thus, the term “labeled binding protein” refers to a protein with a label incorporated that provides for the identification of the binding protein. In an embodiment, the label is a detectable marker that can produce a signal that is detectable by visual or instrumental means, e.g., incorporation of a radiolabeled amino acid or attachment to a polypeptide of biotinyl moieties that can be detected by marked avidin (e.g., streptavidin containing a fluorescent marker or enzymatic activity that can be detected by optical or colorimetric methods). Examples of labels for polypeptides include, but are not limited to, the following: radioisotopes or radionuclides (e.g., ³H, ¹⁴C, ³⁵S, ⁹⁰Y, ⁹⁹Tc, ¹¹¹In, ¹²⁵I, ¹³¹I, ¹⁷⁷Lu, ¹⁶⁶Ho, or ¹⁵³Sm); chromogens, fluorescent labels (e.g., FITC, rhodamine, lanthanide phosphors), enzymatic labels (e.g., horseradish peroxidase, luciferase, alkaline phosphatase); chemiluminescent markers; biotinyl groups; predetermined polypeptide epitopes recognized by a secondary reporter (e.g., leucine zipper pair sequences, binding sites for secondary antibodies, metal binding domains, epitope tags); and magnetic agents, such as gadolinium chelates. Representative examples of labels commonly employed for immunoassays include moieties that produce light, e.g., acridinium compounds, and moieties that produce fluorescence, e.g., fluorescein. In this regard, the moiety itself may not be detectably labeled but may become detectable upon reaction with yet another moiety.

[0108] The term “conjugate” refers to a binding protein that is chemically linked to a second chemical moiety, such as a therapeutic or cytotoxic agent. The term “agent” includes a chemical compound, a mixture of chemical compounds, a biological macromolecule, or an extract made from biological materials. In an embodiment, the therapeutic or cytotoxic agents include, but are not limited to, pertussis toxin, taxol, cytochalasin B, gramicidin D, ethidium bromide, emetine, mitomycin, etoposide, tenoposide, vincristine, vinblastine, colchicin, doxorubicin, daunorubicin, dihydroxy anthracin dione, mitoxantrone, mithramycin, actinomycin D, 1-dehydrotestosterone, glucocorticoids, procaine, tetracaine, lidocaine, propranolol, and puromycin and analogs or homologs thereof. When employed in the context of an immunoassay, the conjugate antibody may be a detectably labeled antibody used as the detection antibody.

[0109] The terms “crystal” and “crystallized” refer to a binding protein (e.g., an antibody), or antigen binding portion thereof, that exists in the form of a crystal. Crystals are one form of the solid state of matter, which is distinct from other forms such as the amorphous solid state or the liquid crystalline state. Crystals are composed of regular, repeating, three-dimensional arrays of atoms, ions, molecules (e.g., proteins such as antibodies), or molecular assemblies (e.g., antigen/antibody complexes). These three-dimensional arrays are arranged according to specific mathematical relationships that are well-understood in the field. The fundamental unit, or building block, that is repeated in a crystal is called the asymmetric unit. Repetition of the asymmetric unit in an arrangement that conforms to a given, well-defined crystallographic symmetry provides the “unit cell” of the crystal. Repetition of the unit cell by regular translations in all three dimensions provides the crystal. (See Giege and Ducruix (1999) CRYSTALLIZATION OF NUCLEIC ACIDS AND PROTEINS, A PRACTICAL APPROACH, 2nd ed., pp. 20 1-16, Oxford University Press, NY, NY).

[0110] The term “vector” refers to a nucleic acid molecule capable of transporting another nucleic acid to which it has been linked. One type of vector is a “plasmid,” which refers to a circular double stranded DNA loop into which additional DNA segments may be ligated. Another type of vector is a viral vector, wherein additional DNA segments may be ligated into the viral genome. Other vectors include RNA vectors. Certain vectors are capable of autonomous replication in a host cell into which they are introduced (e.g., bacterial vectors having a bacterial origin of replication and episomal mammalian vectors). Other vectors (e.g., non-episomal mammalian vectors) can be integrated into the genome of a host cell upon introduction into the host cell, and thereby are replicated along with the host genome. Certain vectors are capable of directing the expression of genes to which they are operatively linked. Such vectors are referred to herein as “recombinant expression vectors” (or simply, “expression vectors”). In general, expression vectors of utility in recombinant DNA techniques are often in the form of plasmids. In the present specification, “plasmid” and “vector” may be used interchangeably as the plasmid is the most commonly used form of vector. However, other forms of expression vectors are also included, such as viral vectors (e.g., replication defective retroviruses, adenoviruses and adeno-associated viruses), which serve equivalent functions. A group of pHybE vectors (e.g., U.S. Pat. No. 8,187,836) may be used for parental antibody and DVD-binding protein cloning. V1, derived from pJP183; pHybE-hCgl,z,non-a V2, may be used for cloning of antibody and DVD heavy chains with a wild type constant region. V2, derived from pJP191; pHybE-hCk V3, may be used for cloning of antibody and DVD light chains with a kappa constant region. V3, derived from pJP192; pHybE-hCl V2, may be used for cloning of antibody and DVD light chains with a lambda constant region. V4, built with a lambda signal peptide and a kappa constant region, may be used for cloning of DVD light chains with a lambda-kappa hybrid V domain. V5, built with a kappa signal peptide and a lambda constant region, may be used for cloning of DVD light chains with a kappa-lambda hybrid V domain. V7, derived from pJP183; pHybE-hCgl,z,non-a V2, may be used for cloning of antibody and DVD heavy chains with a (234,235 AA) mutant constant region.

[0111] The terms “recombinant host cell” or “host cell” refer to a cell into which exogenous, e.g., recombinant, DNA has been introduced. Such terms refer not only to the particular subject cell, but to the progeny of such a cell. Because certain modifications may occur in succeeding generations due to either mutation or environmental influences, such progeny may not, in fact, be identical to the parent cell, but are still included within the scope of the term “host cell” as used herein. In an embodiment, host cells include prokaryotic and eukaryotic cells. In an embodiment, eukaryotic cells include protist, fungal, plant and animal cells. In another embodiment, host cells include but are not limited to the prokaryotic cell line E. coli; mammalian cell lines CHO, HEK 293, COS, NS0, SP2 and PER.C6; the insect cell line Sf9; and the fungal cell Saccharomyces cerevisiae.

[0112] The term “transfection” encompasses a variety of techniques commonly used for the introduction of exogenous nucleic acid (e.g., DNA) into a host cell, e.g., electroporation, calcium-phosphate precipitation, DEAE-dextran transfection and the like.

[0113] The term “cytokine” refers to a protein released by one cell population that acts on another cell population as an intercellular mediator. The term “cytokine” includes proteins from natural sources or from recombinant cell culture and biologically active equivalents of the native sequence cytokines.

[0114] The term “biological sample” refers to a quantity of a substance from a living thing or formerly living thing. Such substances include, but are not limited to, blood, plasma, serum, urine, amniotic fluid, synovial fluid, endothelial cells, leukocytes, monocytes, other cells, organs, tissues, bone marrow, lymph nodes and spleen.

[0115] The term “component” refers to an element of a composition. In relation to a diagnostic kit, for example, a component may be a capture antibody, a detection or conjugate antibody, a control, a calibrator, a series of calibrators, a sensitivity panel, a container, a buffer, a diluent, a salt, an enzyme, a co-factor for an enzyme, a detection reagent, a pretreatment reagent/solution, a substrate (e.g., as a solution), a stop solution, and the like that can be included in a kit for assay of a test sample. Thus, a “component” can include a polypeptide or other analyte as above, that is immobilized on a solid support, such as by binding to an anti-analyte (e.g., anti-polypeptide) antibody. Some components can be in solution or lyophilized for reconstitution for use in an assay.

[0116] The term “control” refers to a composition known to not analyte (“negative control”) or to contain analyte (“positive control”). A positive control can comprise a known concentration of analyte. A “positive control” can be used to establish assay performance characteristics and is a useful indicator of the integrity of reagents (e.g., analytes).

[0117] The term “predetermined level” refers generally to an assay cutoff value that is used to assess diagnostic/prognostic/therapeutic efficacy results by comparing the assay results against the predetermined cutoff/level, where the predetermined cutoff/level already has been linked or associated with various clinical parameters (e.g., severity of disease, progression/nonprogression/improvement, etc.). While the present disclosure may provide exemplary predetermined levels, it is well-known that cutoff values may vary depending on the nature of the immunoassay (e.g., antibodies employed, etc.). It further is well within the ordinary skill of one in the art to adapt the disclosure herein for other immunoassays to obtain immunoassay-specific cutoff values for those other immunoassays based on this disclosure. Whereas the precise value of the predetermined cutoff/level may vary between assays, correlations as described herein (if any) may be generally applicable.

[0118] The term “specific binding partner” refers to a member of a specific binding pair. A specific binding pair comprises two different molecules that specifically bind to each other through chemical or physical means. Therefore, in addition to antigen and antibody specific binding, other specific binding pairs can include biotin and avidin (or streptavidin), carbohydrates and lectins, complementary nucleotide sequences, effector and receptor molecules, cofactors and enzymes, enzyme inhibitors and enzymes, and the like. Furthermore, specific binding pairs can include members that are analogs of the original specific binding members, for example, an analyte-analog Immunoreactive specific binding members include antigens, antigen fragments, and antibodies, including monoclonal and polyclonal antibodies as well as complexes, fragments, and variants (including fragments of variants) thereof, whether isolated or recombinantly produced.

[0119] The term “Fc region” refers to the C-terminal region of an immunoglobulin heavy chain, which in some instances may be generated by papain digestion of an intact antibody or binding protein. The Fc region may be a native sequence Fc region or a variant Fc region. The Fc region of an immunoglobulin generally comprises two constant domains, a CH2 domain and a CH3 domain, and optionally comprises a CH4 domain. Replacement of amino acid residues in the Fc portion is contemplated by the disclosure. The Fc region mediates several effector functions, e.g., cytokine induction, antibody dependent cell mediated cytotoxicity (ADCC), phagocytosis, complement dependent cytotoxicity (CDC), and half-life/clearance rate of antibody or binding protein and antigen-antibody or antigen-binding protein complexes. In some cases these effector functions are desirable for a therapeutic immunoglobulin but in other cases might be unnecessary or even deleterious, depending on the therapeutic objectives.

[0120] The term “antigen-binding portion” of a binding protein refers to one or more fragments of a binding protein that retain the ability to specifically bind to an antigen. The antigen-binding function of a binding protein may be performed by fragments of a full-length binding protein, including bispecific, dual specific, or multi-specific formats; for instance, binding to two or more different antigens. Examples of binding fragments encompassed within the term “antigen-binding portion” of an binding protein include (i) an Fab fragment, a monovalent fragment consisting of the VL, VH, CL and CH1 domains; (ii) an F(ab′)₂ fragment, a bivalent fragment comprising two Fab fragments linked by a disulfide bridge at the hinge region; (iii) an Fd fragment consisting of the VH and CH1 domains; (iv) an Fv fragment consisting of the VL and VH domains of a single arm of an antibody or binding protein, (v) a dAb fragment, which comprises a single variable domain; and (vi) an isolated complementarity determining region (CDR). Furthermore, although the two domains of the Fv fragment, VL and VH, are encoded by separate genes, they may be joined, e.g., using recombinant methods, by a synthetic linker that enables them to be made as a single protein chain in which the VL and VH regions pair to form monovalent molecules (known as single chain Fv (scFv). Such single chain antibodies or binding proteins are also intended to be encompassed within the term “antigen-binding portion” of an antibody or binding protein. Other forms of single chain antibodies, such as diabodies are also encompassed. In addition, single chain antibodies or binding protein also include “linear” antibodies or binding protein comprising a pair of tandem Fv segments (VH-CH1-VH-CH1) which, together with complementary light chain polypeptides, form a pair of antigen binding regions.

[0121] The terms “antigen binding site” and “binding site for an antigen” are used interchangeably, and refer to a region formed by the association between three CDRs from a heavy chain variable domain and three CDRs from a light chain variable domain. Thus, the term also encompasses a region formed by the association between a heavy chain variable domain and a light chain variable domain. An antigen binding site as described herein is capable of specifically binding to an antigen. The term “antigen binding region” refers to a portion of a binding protein that comprises one, two, three, four, or more antigen binding sites. An antigen binding region of a binding protein as described herein therefore is capable of binding one, two, three, four, or more antigens that are the same or different.

[0122] The term “multivalent binding protein” refers to a binding protein comprising two or more antigen binding sites. In an embodiment, the multivalent binding protein is engineered to have three or more antigen binding sites, and may not be a naturally occurring antibody. The term “multispecific binding protein” refers to a binding protein capable of binding two or more related or unrelated targets. In an embodiment, the dual variable domain (DVD) binding proteins provided herein may comprise two or more antigen binding sites and are tetravalent or multivalent binding proteins.

[0123] A “bivalent” binding protein described herein comprises two antigen binding sites that bind to the same or different antigens (or epitopes). For instance, a bivalent binding protein described herein may be monospecific or bispecific depending on whether two antigen binding sites of the bivalent binding protein bind to the same or different antigens. If the two antigen binding sites bind to the same antigen, the bivalent binding protein is monospecific. Otherwise, the bivalent binding protein binds to two different antigens and therefore is bispecific.

[0124] The term “linker” refers to an amino acid residue or a polypeptide comprising two or more amino acid residues joined by peptide bonds that are used to link two polypeptides (e.g., two VH or two VL domains) Such linker polypeptides are well known in the art (see, e.g., Holliger et al. (1993) Proc. Natl. Acad. Sci. USA 90:6444-6448; Poljak et al. (1994) Structure 2:1121-1123).

[0125] The terms “Kabat numbering”, “Kabat definitions” and “Kabat labeling” are used interchangeably herein. These terms, which are recognized in the art, refer to a system of numbering amino acid residues which are more variable (i.e., hypervariable) than other amino acid residues in the heavy and light chain variable regions of an antibody or binding protein, or an antigen binding portion thereof (Kabat et al. (1971) Ann. NY Acad. Sci. 190:382-391 and

[0126] Kabat et al. (1991) Sequences of Proteins of Immunological Interest, Fifth Edition, U.S. Department of Health and Human Services, NIH Publication No. 91-3242). For the heavy chain variable region, the hypervariable region ranges from amino acid positions 31 to 35 for CDR1, amino acid positions 50 to 65 for CDR2, and amino acid positions 95 to 102 for CDR3. For the light chain variable region, the hypervariable region ranges from amino acid positions 24 to 34 for CDR1, amino acid positions 50 to 56 for CDR2, and amino acid positions 89 to 97 for CDR3. In some embodiments, the CDR sequences, framework sequences, and or constant region sequences are identified using Kabat numbering.

[0127] The term “CDR” refers to a complementarity determining region within an immunoglobulin variable region sequence. There are three CDRs in each of the variable regions of the heavy chain and the light chain, which are designated CDR1, CDR2 and CDR3, for each of the heavy and light chain variable regions. The term “CDR set” refers to a group of three CDRs that occur in a single variable region capable of binding the antigen. The exact boundaries of these CDRs have been defined differently according to different systems. The system described by Kabat (Kabat et al. (1987) and (1991)) not only provides an unambiguous residue numbering system applicable to any variable region of an antibody or binding protein, but also provides precise residue boundaries defining the three CDRs in each heavy or light chain sequence. These CDRs may be referred to as Kabat CDRs. Chothia and coworkers (Chothia and Lesk (1987) J. Mol. Biol. 196:901-917; Chothia et al. (1989) Nature 342:877-883) found that certain sub-portions within Kabat CDRs adopt nearly identical peptide backbone conformations, despite having great diversity at the level of amino acid sequence. These sub-portions were designated as L1, L2 and L3 or H1, H2 and H3 where the “L” and the “H” designates the light chain and the heavy chain regions, respectively. These regions may be referred to as Chothia CDRs, which have boundaries that overlap with Kabat CDRs. Other boundaries defining CDRs overlapping with the Kabat CDRs have been described by Padlan (1995) FASEB J. 9:133-139 and MacCallum (1996) J. Mol. Biol. 262(5):732-45). Still other CDR boundary definitions may not strictly follow one of the herein systems, but will nonetheless overlap with the Kabat CDRs, although they may be shortened or lengthened in light of prediction or experimental findings that particular residues or groups of residues or even entire CDRs do not significantly impact antigen binding. The methods used herein may utilize CDRs defined according to any of these systems, although certain embodiments use Kabat or Chothia defined CDRs.

[0128] The term “epitope” refers to a region of an antigen that is bound by a binding protein. In certain embodiments, epitope determinants include chemically active surface groupings of molecules such as amino acids, sugar side chains, phosphoryl, or sulfonyl, and, in certain embodiments, may have specific three dimensional structural characteristics, and/or specific charge characteristics. In an embodiment, an epitope comprises the amino acid residues of a region of an antigen (or fragment thereof) that are recognized by and/or bound by the complementary site on the specific binding partner. An antigenic fragment can contain more than one epitope. In certain embodiments, a binding protein specifically binds an antigen when it recognizes its target antigen in a complex mixture of proteins and/or macromolecules. Binding proteins “bind to the same epitope” if the antibodies or binding proteins cross-compete (one prevents the binding or modulating effect of the other). Methods of visualizing and modeling epitope recognition are known to one skilled in the art (see, e.g., U.S. Pat. No. 7,612,181).

[0129] The term “pharmacokinetic(s)” refers to the process by which a drug is absorbed, distributed, metabolized, and excreted by an organism. To generate a multivalent binding protein molecule with a desired pharmacokinetic profile, parent monoclonal antibodies with similarly desired pharmacokinetic profiles are selected. The PK profiles of the selected parental monoclonal antibodies can be easily determined in rodents using methods known to one skilled in the art (see, e.g., U.S. Pat. No. 7,612,181).

[0130] The term “bioavailability” refers to the degree and rate at which a drug is absorbed into a living system or is made available at the site of physiological activity. Bioavailability can be a function of several of the previously described properties, including stability, solubility, immunogenicity and pharmacokinetics, and can be assessed using methods known to one skilled in the art (see, e.g., U.S. Pat. No. 7,612,181).

[0131] The term “surface plasmon resonance” refers to an optical phenomenon that allows for the analysis of real-time biospecific interactions by detection of alterations in protein concentrations within a biosensor matrix, for example using the BIAcore® system (BIAcore International AB, a GE Healthcare company, Uppsala, Sweden and Piscataway, N.J.). For further descriptions, see Jonsson et al. (1993) Ann. Biol. Clin. 51:19-26. The term “Kₒₙ” refers to the on rate constant for association of a binding protein (e.g., an antibody or DVD-Ig) to the antigen to form, e.g., a DVD-Ig/antigen complex. The term “Kₒₙ” also refers to “association rate constant”, or “ka”, as is used interchangeably herein. This value indicating the binding rate of a binding protein to its target antigen or the rate of complex formation between a binding protein, e.g., an antibody, and antigen also is shown by the equation below:

Antibody(“Ab”)+Antigen(“Ag”)→Ab−Ag

[0132] The term “K_{off}” refers to the off rate constant for dissociation, or “dissociation rate constant”, of a binding protein (e.g., an antibody or DVD-Ig) from the, e.g., DVD-Ig/antigen complex as is known in the art. This value indicates the dissociation rate of a binding protein, e.g., an antibody, from its target antigen or separation of Ab−Ag complex over time into free antibody and antigen as shown by the equation below:

Ab+Ag←Ab−Ag

[0133] The terms “K_{d}” and “equilibrium dissociation constant” may refer to the value obtained in a titration measurement at equilibrium, or by dividing the dissociation rate constant (K_{off}) by the association rate constant (Kₒₙ). The association rate constant, the dissociation rate constant and the equilibrium dissociation constant, are used to represent the binding affinity of a binding protein (e.g., an antibody or DVD-Ig) to an antigen. Methods for determining association and dissociation rate constants are well known in the art. Using fluorescence-based techniques offers high sensitivity and the ability to examine samples in physiological buffers at equilibrium. Other experimental approaches and instruments such as a BIAcore® (biomolecular interaction analysis) assay, can be used (e.g., instrument available from BIAcore International AB, a GE Healthcare company, Uppsala, Sweden). Additionally, a KinExA® (Kinetic Exclusion Assay) assay, available from Sapidyne Instruments (Boise, Id.), can also be used.

[0134] The term “variant” refers to a polypeptide that differs from a given polypeptide in amino acid sequence by the addition (e.g., insertion), deletion, or conservative substitution of amino acids, but that retains the biological activity of the given polypeptide. A conservative substitution of an amino acid, i.e., replacing an amino acid with a different amino acid of similar properties (e.g., hydrophilicity and degree and distribution of charged regions) is recognized in the art as typically involving a minor change. These minor changes can be identified, in part, by considering the hydropathic index of amino acids, as understood in the art (see, e.g., Kyte et al. (1982) J. Mol. Biol. 157: 105-132). The hydropathic index of an amino acid is based on a consideration of its hydrophobicity and charge. It is known in the art that amino acids of similar hydropathic indexes in a protein can be substituted and the protein still retains protein function. In one aspect, amino acids having hydropathic indexes of ±2 are substituted. The hydrophilicity of amino acids also can be used to reveal substitutions that would result in proteins retaining biological function. A consideration of the hydrophilicity of amino acids in the context of a peptide permits calculation of the greatest local average hydrophilicity of that peptide, a useful measure that has been reported to correlate well with antigenicity and immunogenicity (see, e.g., U.S. Pat. No. 4,554,101). Substitution of amino acids having similar hydrophilicity values can result in peptides retaining biological activity, for example immunogenicity, as is understood in the art. In one aspect, substitutions are performed with amino acids having hydrophilicity values within ±2 of each other. Both the hydrophobicity index and the hydrophilicity value of amino acids are influenced by the particular side chain of that amino acid. Consistent with that observation, amino acid substitutions that are compatible with biological function are understood to depend on the relative similarity of the amino acids, and particularly the side chains of those amino acids, as revealed by the hydrophobicity, hydrophilicity, charge, size, and other properties. The term “variant” also includes polypeptide or fragment thereof that has been differentially processed, such as by proteolysis, phosphorylation, or other post-translational modification, yet retains its biological activity or antigen reactivity, e.g., the ability to bind to VEGF. The term “variant” encompasses fragments of a variant unless otherwise defined. A variant may be about 99%, 98%, 97%, 96%, 95%, 94%, 93%, 92%, 91%, 90%, 89%, 88%, 87%, 86%, 85%, 84%, 83%, 82%, 81%, 80%, 79%, 78%, 77%, 76%, or 75% identical to the wild type sequence.

[0135] It will be readily apparent to those skilled in the art that other suitable modifications and adaptations of the methods described herein are obvious and may be made using suitable equivalents without departing from the scope of the embodiments disclosed herein. Having now described certain embodiments in detail, the same will be more clearly understood by reference to the following examples, which are included for purposes of illustration only and are not intended to be limiting.

### EXAMPLES

### Example 1: IgM CH2 and IgE CH2 Structure and Sequence

[0136] The heavy chains of IgM and IgE molecules contain an additional domain (CH2, Cm2 and C12) in place of the hinge region seen in an IgG molecule (Perkins et al. (1991) J. Mol. Biol. 221: 1345-1366; Beavil et al. (1995) Biochemistry 34: 14449-14461; Wan et al. (2002) Nature Immunol. 3: 681-686), as shown in FIG. 1A. The IgM CH2 domain (MH2) consists of 111 amino acid residues (12.2 kDa) forming a homodimer covalently held together by a disulfide bond formed between cysteine residue 125 on each CH2 domain (Davis et al. (1989) EMBO J. 8: 2519-2526; Davis et al. (1989) Immunol. Today 10: 118-122 and 127-118). Each domain is further stabilized by an internal disulfide bond between cysteine residues 23 and 104 (Putnam et al. (1973) Science 182: 287-291). MH2 has an N-glycosylation site at residue 120. MH2 alone is capable of forming covalently linked dimers. A melting point of 55° C. was determined by dynamic light scattering. All MH2 variants with a mutation to remove disulfide bond(s) or N-glycosylation exhibit a reduced thermal stability when compared with the wild-type MH2, indicating that the interdomain disulfide bond, as well as N-glycans on the molecule, contribute to MH2 stability. The N-glycosylation may be altered by glyco-engineering to modulate the pharmacokinetic properties of MH2 or MH2 variant-containing molecules.

[0137] The IgE CH2 domain (EH2) consists of 107 amino acid residues forming a homodimer covalently held together by two inter-chain disulfide bonds, which are formed between cysteine residue 11 and 124 of two domains. Each domain is further stabilized by an intra-chain disulfide bond between cysteine residue 23 and 104. EH2 has one N-glycosylation site at residue 38. The N-glycosylation may be altered by glyco-engineering to modulate the pharmacokinetic properties of EH2 or EH2 variant-containing molecules.

[0138] The MH2 and EH2 may be used as a covalently linked dimerization building block to build bispecific or multispecific molecules by fusing other domains at the N and/or C-terminus of MH2 or EH2. In particular, the central location of the MH2 and EH2 within their respective heavy chains, containing further heavy chain sequences at both ends, as well as their contribution to segmental flexibility, suggest they may be suitable for dimerization in multispecific molecules.

### Example 2: Engineering MH2 or EH2 Hetero-Dimerization Domains

[0139] MH2 or EH2 hetero-dimerization may occur when different domains are fused with MH2 or EH2 to form a heterodimer. For example, when IgG VH and VL are fused at the MH2 or EH2 N-terminal, MH2 or EH2 hetero-dimerization will help to form a VH-MH2a/VL-MH2b or VH-EH2a/VL-EH2b heterodimer to obtain an antigen binding domain, while eliminating the formation of non-functional VH-MH2/VH-MH2, VL-MH2/VL-MH2, VH-EH2/VH-EH2, or VL-EH2/VL-EH2 homodimers.

[0140] MH2 or EH2 heterodimers may be engineered by modifying the MH2 or EH2 homodimer interface through electrostatic interactions and/or hydrophobic interactions. When incorporated with other domains to form bispecific or multispecific molecules, the engineering approach also needs to avoid increasing the possibility of forming a dimer between the MH2 and non-MH2 domains or the EH2 and non-EH2 domains. The dimer interface residues may be defined as the residues within 5 Å of paired chain in modeled human MH2 dimer structure or 2Y7Q.pdb for human EH2 dimer. The human MH2 dimer structure can be modeled on a mouse MH2 dimer x-ray structure (4JVU.pdb). The interface residues are underlined in FIG. 1B, which represent potential hetero-dimerization engineering sites.

MH2 domain hetero-dimerization strategies are discussed below, which could also be applied using the EH2 domain.

### Example 2.1: Engineering MH2 Hetero-Dimerization Through Electrostatic Interactions

[0141] Residue D12, K20, Q24, D81, K85.1, and Q119 on both MH2 domains at the MH2 dimer interface form multiple electrostatic interactions through 2 sets of 3 inter-chain pairs: D12-Q119, K20-Q24, and D81-K85.1, as shown in FIG. 2B. A MH2 heterodimer can be constructed by creating a MH2 positive chain (MH2p) by introducing positive residues on one MH2, and negative residues on the other MH2 (MH2n) to pair with positive residues introduced on MH2p. MH2p prefers to pair with MH2n due to attractive electrostatic interactions, and it does not prefer to pair with MH2p due to repulsive electrostatic interactions. MH2n prefers to pair with MH2p rather than with another MH2n for the same reason. One way to create MH2p is to introduce Q24K and D81K on one MH2 and one way to create MH2n is to introduce mutations K20E, Q24E, and K85.1D on the other MH2. The attractive electrostatic interactions formed between MH2p and MH2n are shown in FIG. 2C. The new mutations can be identified and the current set of mutations can be further optimized among the interface residues underlined in FIG. 1B and their surrounding residues through computational and/or experimental approaches for improving hetero-dimerization and thermal stability.

### Example 2.2: Engineering MH2 Heterodimers Through Hydrophobic Interactions

[0142] MH2 heterodimerization may also be achieved by engineering hydrophobic interactions on the MH2:MH2 dimer interface. One way to engineer heterodimers through hydrophobic interactions is to introduce one or more bulky residues on one MH2 to create MH2 ‘knobs’ (MH2k) and to introduce one or more small residues on the other MH2 to create MH2 ‘holes’ (MH2h) to compensate for the bulky residues introduced on MH2k. For example, residues I22, Q24 and T86 on the MH2 dimer interface, as shown in FIG. 3B, can be modified. MH2k is created by introducing mutation I22W on one MH2 and MH2h is created by introducing mutations I22A, Q24S, and T86A on the other MH2 to compensate for the bulky residue W22 on MH2k, as shown in FIG. 3C. An attractive hydrophobic interaction forms between MH2k and MH2h. MH2k prefers to pair with MH2h instead of forming a homodimer with itself, and vice versa. In addition to these mutations, further modifications at interface residues underlined in FIG. 1B and their surrounding residues can be introduced through computational and/or experimental approaches for improving heterodimerization and thermal stability.

### Example 2.3: Engineering MH2 Heterodimers Through Library-Based Molecular Evolution

[0143] Synthetic libraries, which include all potential mutations at MH2 interface residues and surrounding residues, can be used to optimize MH2 hetero-dimerization.

### Example 2.4: Engineered MH2 Domain Only Forming a Heterodimer

[0144] The wild type and engineered MH2 domains as described in Examples 2.1 and 2.2 (sequences are listed in Table 2) are cloned into expression vector as shown in FIG. 4A. The wild type and engineered MH2 domains (MH2n, MH2p, MH2h, and MH2k) were expressed alone in HEK293 cells. Co-expression of MH2n/MH2p and MH2h/MH2k was also carried out. All proteins were purified by Ni-NTA beads. As shown in FIG. 4B, in the Non-reducing SDS-PAGE, MH2 formed homodimers with wild type MH2 expressed alone. There was no homodimer formation with MH2n, MH2p, or MH2h expressed alone. There was slight dimer formation with MH2k expressed alone. Dimers formed with the co-expression of MH2n/MH2p and MH2h/MH2k. Dimerization improved protein expression as MH2n/MH2p dimer had better expression levels than wild type MH2 dimer and MH2h/MH2k dimer. Since there was no homodimer formation with MH2n or MH2p expressed alone, the dimer formed with MH2n/MH2p co-expression was heterodimeric. In the reducing SDS gel, the inter-chain disulfide bond between MH2 domains was reduced, and only monomer was presented.

### Example 3: Using MH2 or EH2 Homodimer or Engineered Heterodimer to Replace CH1/Cκ(λ) Heterodimer in IgG Molecule

### Example 3.1: Comparing MH2 or EH2 Homodimer with IgG CH1/Cκ(λ) Heterodimer

[0145] MH2 or EH2 includes an anti-parallel beta-sheet Ig fold structure, which is very similar to IgG CH1, Cκ and Cλ, as shown in FIG. 5A. Both the MH2 and EH2 homodimer are covalently linked by a disulfide bond, as is the CH1/Cκ heterodimer. The overall MH2 or EH2 homodimer holds a conformation that is very similar to the CH1/Cκ heterodimer, as shown in FIG. 5B. The dimerization interface residues include the residues within 5 Å of the paired chain, which are underlined in FIG. 5A. The MH2 or EH2 dimer interface sequence diverges enough from the IgG CH1 and Cκ(λ) to avoid MH2 or EH2 pairing with IgG CH1 or Cκ(λ).

### Example 3.2: Replacing CH1/Cκ(λ) Heterodimer by MH2 or EH2 Homodimer in IgG Molecule

[0146] As described in Example 3.1, when compared with CH1/Cκ(λ), the MH2 homodimer or EH2 homodimer has a similar structure, conformation, and stability. The MH2 homodimer or EH2 homodimer provides similar support to VH/VL in an IgG format, preserving the structural and functional integrity of the IgG variable domain. The MH2 or EH2 domain is covalently linked by disulfide bond(s) to form a dimer and will not pair with another domain in the IgG molecule, such as VH, VL, CH2, or CH3. As shown in FIG. 6, using an MH2 or EH2 homodimer to replace CH1/κ(λ) in the IgG molecule may still produce a mixture of the desired molecule and others caused by MH2 or EH2 homodimerization, as shown in FIG. 6, box B. These alternate structures listed in FIG. 6, box B are easily separated from the desired molecule by standard protein purification methods. However, their presence impacts the yield of the desired molecules.

### Example 3.3: Using MH2 or EH2 Heterodimer to Replace CH1/Cκ(λ) Heterodimer in IgG Molecule

[0147] The MH2 or EH2 heterodimers engineered through the methods described in Example 2 have the same or improved stability, with similar structure conformation, as the original MH2 or EH2 homodimer and CH1/κ(λ) heterodimer. The engineered MH2 or EH2 heterodimer domain is covalently linked by disulfide bond(s) and will not pair with itself or other domains in IgG molecules, such as VH, VL, CH2, or CH3. Further, using the MH2 (MH2a/MH2b) or EH2 (EH2a/EH2b) heterodimer instead of MH2 or EH2 homodimer to replace CH1/κ(λ) in an IgG molecule eliminates the contaminants listed in FIG. 6, box B and preserves the structural and functional integrity of the IgG variable domain.

### Example 3.4: DE Loop Engineering on MH2 to Improve the Interface Between VII and MH2 or the Interface Between VL and MH2

[0148] In an IgG molecule, the DE loop of IgG CH1 contacts a heavy chain variable domain (VH) and the DE loop of Cκ contacts a light chain variable domain (VL). When CH1/Cκ is replaced by a MH2 homo- or hetero-dimer, the DE loop of MH2 will contact VH or VL, respectively. As shown in FIG. 7, the DE loop of MH2 has a different length and sequence from the DE loop of CH1 and Cκ. In order to mimic the interface between CH1 and VH, the MH2 DE loop underlined in FIG. 7, which includes residue 84.3A, 84.4K, 84.5E, 84.65, 85.6G, 85.5P, and 85.4T, can be replaced by an IgG CH1 DE loop including residue 84.3S, 84.4S and 85.4G when MH2 is used to replace CH1. The mutated MH2 domain is named MH2mH. The same DE loop of MH2 can also be replaced by the DE loop of IgG Cκ, including residue 84.3S, 84.4K, 84.5D and 85.4S, to mimic VL/Cκ interface at VL/MH2 interface. The mutated MH2 domain is named MH2 mL.

### Example 3.5: Linker Between Variable Domains and MH2 or EH2 Domain

[0149] When an IgG VH or VL is fused at the N-terminal of MH2 or EH2, a short linker may help to optimize the interface between the variable domain and the MH2 or EH2 domain. The linker may be, for example, a natural extension of an IgG variable domain, a GS linker, and/or any other short peptide.

### Example 3.6: Modification of IgG Hinge Region when MH2 or EH2 Domains are Fused at the N-Terminal

[0150] The hinge region of human IgG1, EPKSCDKTHTCPPCP (SEQ ID NO:32), has three cysteine residues. The first cysteine residue in the hinge region forms an inter-chain disulfide bond with the last cysteine residue in the light chain constant domain. The other two cysteine residues form two inter-heavy chain disulfide bonds to stabilize heavy chain dimerization. When CH1/Cκ(λ) is replaced by MH2 homo- or hetero-dimer or EH2 homo- or hetero-dimer in an IgG molecule, the first cysteine residue in the hinge region may form an extra inter-heavy chain disulfide bond. If two inter-heavy chain disulfide bonds are preferred, this may be achieved by mutating out the first cysteine or shortening the hinge region by 5 residues at the N-terminal to DKTHTCPPCP (SEQ ID NO:33).

### Example 4: Modulating Glycosylation Site on MH or EH2 Domain to Introduce 0-4 Glycosylation Site in IgG Molecules when Replacing CH1/Cκ(λ) by MH2 or EH2 Homo- or Engineered Hetero-Dimer

[0151] As described in Examples 1 and 3, there is one N-glycosylation site in the MH2 domain and one in the EH2 domain. Replacing CH1/κ(λ) by a MH2 or EH2 homo- or engineered hetero-dimer will introduce 4 additional glycosylation sites in IgG molecules. The N-glycosylation site on MH2 or EH2 may be eliminated by mutation at positions 120 or 122 in MH2 or at positions 38 or 40 in EH2 respectively to reduce molecular heterogeneity. Alternative glyco-engineering to modulate the pharmacokinetic properties of the molecules can also be used.

### Example 5: Replacing One Arm CH1/Cκ(λ) by MH2 or EH2 Homo- or Engineered Hetero-Dimer in Heavy Chain Hetero-Dimerization Based Bispecific Molecule

[0152] Efficient production of bispecific IgG in a single host cell requires simultaneously overcoming both light chain and heavy chain pairing problems. Table 1 below lists exemplary currently available heavy chain heterodimerization strategies through IgG CH3 engineering. The symmetry of CH1/κ(λ) dimerization on both arms of IgG is the main reason to cause light chain mispairing in bispecific IgG generation. As described in Example 3, the MH2 or EH2 homo- or engineered hetero-dimer is structurally similar to CH1/Cκ(λ) and may be used to replace CH1/κ(λ) in an IgG molecule to support VH/VL pairing. The sequence divergence among the interface residues eliminates the pairing between MH2 and non-MH2 domains, or EH2 and non-EH2 domains, such as VH, VL, CH1, Cκ(λ), CH2, or CH3. Replacing one arm CH1/κ(λ) by a MH2 or EH2 dimer overcomes both light chain and heavy chain mispairing for one arm in bispecific IgG generation. The knobs-into-holes format is used as an example of the heavy chain hetero-dimerization approach for generating heterodimers of the two arms of an IgG, but any other heavy chain hetero-dimerization approach could also be used.

TABLE 1
Strategies And Mutations To Overcome The Bispecific IgG Heavy Chain-Pairing Problem

| | | Mutations In First | Mutations In Second | |
|---|---|---|---|---|
| Company | Technology Name | Heavy Chain | Heavy Chain | Reference |
| Genentech | Knobs-into-holes | T366W | T366S, L368A, Y407V | Ridgway et al. (1996) |
| | | | | Protein Engineering 9: |
| | | | | 617-621; Atwell et al. |
| | | | | (1997) J. Mol. Biol. 270: |
| | | | | 26-35 |
| Genmab | DuoBody | F405L | K409R | Labrijn et al. (2013) Proc. |
| | | | | Natl. Acad. Sci. USA 110: |
| | | | | 5145-5150 |
| Zymeworks | Azymetric | T350V, L351Y, F405A, | T350V, T366L, K392L, | Von Kreudenstein et al. |
| | | Y407A | T394W | (2013) mAbs 5: 646-654 |
| Amgen | Charge pair | K409D, K392D | D399K, E356K | Gunasekaran et al. (2010) |
| | | | | J. Biol. Chem. 285: 19637- |
| | | | | 19646 |
| Rinat-Pfizer | Charge pair | D221E, P228E, L368E | D221R, P228R, K409R | Strop et al. (2012) J. Mol. |
| | | | | Biol. 420: 204-219 |
| Xencor | HA-TF | S364H, F405A | Y349T, T394F | Moore et al. (2011) mAbs |
| | | | | 3: 546-557 |
| EMD Serono | SEEDbody | IgG/A chimera | IgA/G chimera | Davis et al. (2010) Protein |
| | | | | Engineering, Design & |
| | | | | Selection: PEDS 23: 195-202 |
| Regeneron | Differential protein | H435R | None | Davis et al. (2013) Regeneron |
| | A affinity | | | Pharmaceuticals, Ed. |

### Example 5.1: Replacing One Arm CH1/Cκ(λ) by MH2 or EH2 Dimer in Knobs-into-Holes Format

[0153] Replacing a CH1/κ(λ) heterodimer on one arm of an IgG with an MH2 or EH2 homodimer in knobs-into-holes format eliminates MH2 or EH2 pairing with IgG CH or Cκ(λ). However, MH2 or EH2 homo-dimerization might still cause potential contaminants, as discussed above. Using an MH2 or EH2 heterodimer engineered by the strategies presented in Example 2, such as MH2p/MH2n or MH2k/MH2h, eliminates the contaminants, as shown in FIG. 8.

### Example 5.2: Modification of IgG Hinge Region when One Arm CH1/Cκ(λ) is Replaced by MH2 or EH2 Dimer in Knobs-into-Holes Format

[0154] The first cysteine residue in the IgG1 hinge region, EPKSCDKTHTCPPCP (SEQ ID NO:32) forms an inter-chain disulfide bond with the last cysteine residue in the light chain constant domain. When one arm CH1/κ(λ) in knobs-into-holes format is replaced by a MH2 or EH2 dimer, the hinge region after the MH2 or EH2 domain may be reduced by 5 amino acid residues at the N-terminal to DKTHTCPPCP (SEQ ID NO:33). The hinge region after CH1 in the other heavy chain keeps the original length.

### Example 6: Using CH1/Cλ, CH/Cλ, MH2(MH2a/MH2b), or EH2(EH2a/EH2b) Dimer to Replace Cα/Cβ Heterodimer to Build TCR-Ig

[0155] T cell receptor (TCR) Cα and Cβ have similar anti-parallel β sheet Ig fold structure to IgG CH1, Cκ, Cλ, MH2, and EH2, as shown in FIG. 9. Cα and Cβ domains are stabilized by an intra-chain disulfide bond between cysteine residues 23 and 104. There is no inter-chain disulfide bond between TCR Cα and Cβ. Replacing a Cα/Cβ dimer by a CH1/κ(λ) dimer, an MH2 homo- or engineered hetero-dimer, or an EH2 homo- or engineered hetero-dimer to support Vα/Vβ brings in one or two extra inter-chain disulfide bond(s) to stabilize the pairing between Vα and Vβ. As shown in FIG. 10, IgG-like molecules with Vα/Vβ domains combine the TCR binding ability with the effector function and half-life of regular IgG.

### Example 7: Using MH2 or EH2 Dimer to Stabilize DVD-Ig Outer or Inner Variable Domain

[0156] As shown in FIG. 11, an MH2 or EH2 hetero-dimer can be used to stabilize the outer or inner variable domains in a DVD-Ig format with a linker on either chain, or on both the heavy and light chain. The linker is a regular or cleavable linker. The inner and outer variable domains are antibody and/or T cell receptor variable domains.

### Example 8: MH2 or EH2 Dimer is Used as a Dimerization Building Block to Build Bi-/Multi-Specific Molecules with Antibody Variable Domains and/or T Cell Receptor Domains

[0157] As shown in FIG. 12, an MH2 or EH2 homo- or engineered hetero-dimer is used as a dimerization building block in conjunction with heavy chain hetero-dimerization approaches to build bi-, tri-, and tetra-specific IgG-like molecules with antibody variable domains VH/VL and/or T cell receptor Vα/Vβ domains. Knobs-into-holes techniques are used here as an example of a heavy chain hetero-dimerization approach. FIG. 13 lists mono-, bi-, tri-, and tetra-specific fragment molecules using an MH2/EH2 homo- or engineered hetero-dimer as a building block. Molecular valency and specificity may be modulated by using the same or different antigen binding domains.

### Example 9: Generation of IgG-Like Molecules with MH2 Domains

[0158] Table 2 summarizes exemplary sequences of building blocks that may be used to build IgG-like molecules containing wild type or modified IgG and/or IgM domains. Knobs-into-holes technology or other methods listed in Table 1 can be utilized to enhance heavy chain hetero-dimerization.

TABLE 2
Sequences of Building Blocks To Build IgG-Like Molecules Containing Wild
Type Or Engineered Hetero-Dimerization MH2 Domains

| | | SEQ |
|---|---|---|
| | Sequence | ID |
| Domain | 12345678901234567890123456789012345678901234567890 | NO: |
| MH2 | ELPPKVSVFVPPRDGFFGNPRKSKLICQATGFSPRQIQVSWLREGKQVGS | 34 |
| | GVTTDQVQAEAKESGPTTYKVTSTLTIKESDWLGQSMFTCRVDHRGLTFQ | |
| | QNASSMC | |
| MH2p | ELPPKVSVFVPPRDGFFGNPRKSKLICKATGFSPRQIQVSWLREGKQVGS | 35 |
| | GVTTKQVQAEAKESGPTTYKVTSTLTIKESDWLGQSMFTCRVDHRGLTFQ | |
| | QNASSMC | |
| MH2n | ELPPKVSVFVPPRDGFFGNPRKSELICEATGFSPRQIQVSWLREGKQVGS | 36 |
| | GVTTDQVQAEAKESGPTTYDVTSTLTIKESDWLGQSMFTCRVDHRGLTFQ | |
| | QNASSMC | |
| MH2k | ELPPKVSVFVPPRDGFFGNPRKSKLWCQATGFSPRQIQVSWLREGKQVGS | 37 |
| | GVTTDQVQAEAKESGPTTYKVTSTLTIKESDWLGQSMFTCRVDHRGLTFQ | |
| | QNASSMC | |
| MH2h | ELPPKVSVFVPPRDGFFGNPRKSKLACSATGFSPRQIQVSWLREGKQVGS | 38 |
| | GVTTDQVQAEAKESGPTTYKVASTLTIKESDWLGQSMFTCRVDHRGLTFQ | |
| | QNASSMC | |
| MH2.S | ELPPKVSVFVPPRDGFFGNPRKSKLICQATGFSPRQIQVSWLREGKQVGS | 39 |
| | GVTTDQVQAEAKESGPTTYKVTSTLTIKESDWLGQSMFTCRVDHRGLTFQ | |
| | QSASSMC | |
| MH2p.S | ELPPKVSVFVPPRDGFFGNPRKSKLICKATGFSPRQIQVSWLREGKQVGS | 40 |
| | GVTTKQVQAEAKESGPTTYKVTSTLTIKESDWLGQSMFTCRVDHRGLTFQ | |
| | QSASSMC | |
| MH2n.S | ELPPKVSVFVPPRDGFFGNPRKSELICEATGFSPRQIQVSWLREGKQVGS | 41 |
| | GVTTDQVQAEAKESGPTTYDVTSTLTIKESDWLGQSMFTCRVDHRGLTFQ | |
| | QSASSMC | |
| MH2k.S | ELPPKVSVFVPPRDGFFGNPRKSKLWCQATGFSPRQIQVSWLREGKQVGS | 42 |
| | GVTTDQVQAEAKESGPTTYKVTSTLTIKESDWLGQSMFTCRVDHRGLTFQ | |
| | QSASSMC | |
| MH2h.S | ELPPKVSVFVPPRDGFFGNPRKSKLACSATGFSPRQIQVSWLREGKQVGS | 43 |
| | GVTTDQVQAEAKESGPTTYKVASTLTIKESDWLGQSMFTCRVDHRGLTFQ | |
| | QSASSMC | |
| CH1 | ASTKGPSVFPLAPSSKSTSGGTAALGCLVKDYFPEPVTVSWNSGALTSGV | 44 |
| | HTFPAVLQSSGLYSLSSVVTVPSSSLGTQTYICNVNHKPSNTKVDKKV | |
| Cκ | RTVAAPSVFIFPPSDEQLKSGTASVVCLLNNFYPREAKVQWKVDNALQSG | 45 |
| | NSQESVTEQDSKDSTYSLSSTLTLSKADYEKHKVYACEVTHQGLSSPVTK | |
| | SFNRGEC | |
| hinge after | EPKSCDKTHTCPPCP | 32 |
| CH1 | | |
| hinge after | DKTHTCPPCP | 33 |
| MH2/p/n/k/h | | |
| CH2 | APELLGGPSVFLFPPKPKDTLMISRTPEVTCVVVDVSHEDPEVKFNWYVD | 46 |
| | GVEVHNAKTKPREEQYNSTYRVVSVLTVLHQDWLNGKEYKCKVSNKALPA | |
| | PIEKTISKAK | |
| CH2(LALA) | APEAAGGPSVFLFPPKPKDTLMISRTPEVTCVVVDVSHEDPEVKFNWYVD | 47 |
| | GVEVHNAKTKPREEQYNSTYRVVSVLTVLHQDWLNGKEYKCKVSNKALPA | |
| | PIEKTISKAK | |
| CH3 | GQPREPQVYTLPPSREEMTKNQVSLTCLVKGFYPSDIAVEWESNGQPENN | 48 |
| | YKTTPPVLDSDGSFFLYSKLTVDKSRWQQGNVFSCSVMHEALHNHYTQKS | |
| | LSLSPGK | |
| CH3(knobs) | GQPREPQVYTLPPSREEMTKNQVSLWCLVKGFYPSDIAVEWESNGQPENN | 49 |
| | YKTTPPVLDSDGSFFLYSKLTVDKSRWQQGNVFSCSVMHEALHNHYTQKS | |
| | LSLSPGK | |
| CH3(holes) | GQPREPQVYTLPPSREEMTKNQVSLSCAVKGFYPSDIAVEWESNGQPENN | 50 |
| | YKTTPPVLDSDGSFFLVSKLTVDKSRWQQGNVFSCSVMHEALHNHYTQKS | |
| | LSLSPGK | |
| CH3(halfbody) | GQPREPQVYTLPPSREEMTKNQVSLTCLVKGFYPSDIAVEWESNGQPENN | 51 |
| | YKTTPPVLDSDGSFRLYSKLTVDKSRWQQGNVFSCSVMHEALHNHYTQKS | |
| | LSLSPGK | |
| linker | AST | |
| between VH | | |
| and | | |
| MH2/p/n/k/h | | |
| linker | RTA | |
| between VL | | |
| and | | |
| MH2/p/n/k/h | | |

### Example 9.1: Generation of Monospecific Molecules with Wild Type MH2 Homodimer or Engineered MH2a/MH2b Heterodimer

[0159] As described in Example 3.2 and Example 6, a monospecific IgG-like molecule with CH1/Cκ replaced by wild type MH2 homodimer or MH2a/MH2b heterodimer may be generated by two chain transfection. Variable domains may be VH or VL domains from an antibody, or Vα or Vβ from a TCR. VH and VL are paired to bind to specific antigens. Vα and Vβ are paired to bind to specific peptides. Table 3 summarizes 5 exemplary combinations to build bivalent mono-specific molecules using wild type or engineered MH2 dimers with variable domains from antibodies or TCRs.

TABLE 3
Generation Of Monospecific IgG-Molecules Containing
A Wild Type Or Engineered MH2 Dimer With Variable
Domains From Antibody Or TCR

Monospecific IgG -Like Molecule

| | Chain 1 | Chain 2 |
|---|---|---|
| 1 | VH-linker-MH2-hinge-CH2—CH3 | VL-linker-MH2 |
| 2 | VH-linker-MH2p-hinge-CH2—CH3 | VL-linker-MH2n |
| 3 | VH-linker-MH2n-hinge-CH2—CH3 | VL-linker-MH2p |
| 4 | VH-linker-MH2h-hinge-CH2—CH3 | VL-linker-MH2k |
| 5 | VH-linker-MH2k-hinge-CH2—CH3 | VL-linker-MH2h |

[0160] Three bivalent mono-specific molecules with CH1/Cκ replaced by MH2n/MH2p were generated. The variable domains used to generate these molecules are summarized in Table 4, which are from an anti-CD3 antibody (AB596), an anti-TNFa antibody (D2E7), and an anti-HER2 antibody (Herceptin).

TABLE 4
Antibody Variable Domains Used To Build Monospecific Molecules Containing
MH2 Domains

| | | | SEQ |
|---|---|---|---|
| Antibody | | Variable Domain Sequence | ID |
| Target | Domain | 12345678901234567890123456789012345678901234567890 | NO: |
| CD3 | AB596VH | EVTLKESGPVLVKPTETLTLTCTVSGFSLTSFGVSWVRQPPGKGLEWIAA | 52 |
| (AB596) | | IWNSGRMDYNSALKSRLTISRDTSKSQVVLTMTNMDPVDTAMYFCARSGG | |
| | | SHWGQGTLVTVSS | |
| | AB596VK | DIQMTQSPSSLSASVGDRVTITCKPSQNIDKYLNWYQQKPGKAPKRLIYN | 53 |
| | | TNNLQTGIPSRFSGSGSGTEYTLTISSLQPEDFATYFCLQHRSGWTFGGG | |
| | | TKVEIK | |
| TNFa | D2E7VH | EVQLVESGGGLVQPGRSLRLSCAASGFTFDDYAMHWVRQAPGKGLEWVSA | 54 |
| (D2E7) | | ITWNSGHIDYADSVEGRFTISRDNAKNSLYLQMNSLRAEDTAVYYCAKVS | |
| | | YLSTASSLDYWGQGTLVTVSS | |
| | D2E7VK | DIQMTQSPSSLSASVGDRVTITCRASQGIRNYLAWYQQKPGKAPKLLIYA | 55 |
| | | ASTLQSGVPSRFSGSGSGTDFTLTISSLQPEDVATYYCQRYNRAPYTFGQ | |
| | | GTKVEIK | |
| HER2 | Herceptin | EVQLVESGGGLVQPGGSLRLSCAASGFNIKDTYIHWVRQAPGKGLEWVAR | 56 |
| (Herceptin) | VH | IYPTNGYTRYADSVKGRFTISADTSKNTAYLQMNSLRAEDTAVYYCSRWG | |
| | | GDGFYAMDYWGQGTLVTVSS | |
| | Herceptin | DIQMTQSPSSLSASVGDRVTITCRASQDVNTAVAWYQQKPGKAPKLLIYS | 57 |
| | VK | ASFLYSGVPSRFSGSRSGTDFTLTISSLQPEDFATYYCQQHYTTPPTFGQ | |
| | | GTKVEIK | |

[0161] The MH2n and MH2p domains were synthesized by Integrated DNA Technologies. MH2n was incorporated into a heavy chain to replace CH1 while MH2p was incorporated into a light chain to replace Cκ. A Sal I restriction site was introduced to the 5′ end of the MH2 for constructing the MH2 heavy chain vector, and a BsiW I site for the MH2 light chain vector. Two plasmid vectors were used for the transfection of each bivalent mono-specific MH2 molecule. The sequence of each molecule is summarized in the Table 5.

TABLE 5
Sequences of Generated Bivalent Monospecific Molecules Containing MH2
Domains

| Mono- | | | SEQ |
|---|---|---|---|
| specific | | Sequence | ID |
| molecules | Chain | 12345678901234567890123456789012345678901234567890 | NO |
| AB596- | AB596VH- | EVTLKESGPVLVKPTETLTLTCTVSGFSLTSFGVSWVRQPPGKGLEWIAA | 58 |
| MH2n/p | linker- | IWNSGRMDYNSALKSRLTISRDTSKSQVVLTMTNMDPVDTAMYFCARSGG | |
| | MH2n- | SHWGQGTLVTVSSASTELPPKVSVFVPPRDGFFGNPRKSELICEATGFSP | |
| | Hinge- | RQIQVSWLREGKQVGSGVTTDQVQAEAKESGPTTYDVTSTLTIKESDWLG | |
| | CH2-CH3 | QSMFTCRVDHRGLTFQQNASSMCDKTHTCPPCPAPEAAGGPSVFLFPPKP | |
| | | KDTLMISRTPEVTCVVVDVSHEDPEVKFNWYVDGVEVHNAKTKPREEQYN | |
| | | STYRVVSVLTVLHQDWLNGKEYKCKVSNKALPAPIEKTISKAKGQPREPQ | |
| | | VYTLPPSREEMTKNQVSLWCLVKGFYPSDIAVEWESNGQPENNYKTTPPV | |
| | | LDSDGSFFLYSKLTVDKSRWQQGNVFSCSVMHEALHNHYTQKSLSLSPGK | |
| | AB596VL- | DIQMTQSPSSLSASVGDRVTITCKPSQNIDKYLNWYQQKPGKAPKRLIYN | 59 |
| | linker- | TNNLQTGIPSRFSGSGSGTEYTLTISSLQPEDFATYFCLQHRSGWTFGGG | |
| | MH2p | TKVEIKRTAELPPKVSVFVPPRDGFFGNPRKSKLICKATGFSPRQIQVSW | |
| | | LREGKQVGSGVTTKQVQAEAKESGPTTYKVTSTLTIKESDWLGQSMFTCR | |
| | | VDHRGLTFQQNASSMC | |
| D2E7- | D2E7VH- | EVQLVESGGGLVQPGRSLRLSCAASGFTFDDYAMHWVRQAPGKGLEWVSA | 60 |
| MH2n/p | linker- | ITWNSGHIDYADSVEGRFTISRDNAKNSLYLQMNSLRAEDTAVYYCAKVS | |
| | MH2n- | YLSTASSLDYWGQGTLVTVSSASTELPPKVSVFVPPRDGFFGNPRKSELI | |
| | Hinge- | CEATGFSPRQIQVSWLREGKQVGSGVTTDQVQAEAKESGPTTYDVTSTLT | |
| | CH2-CH3 | IKESDWLGQSMFTCRVDHRGLTFQQNASSMCDKTHTCPPCPAPEAAGGPS | |
| | | VFLFPPKPKDTLMISRTPEVTCVVVDVSHEDPEVKFNWYVDGVEVHNAKT | |
| | | KPREEQYNSTYRVVSVLTVLHQDWLNGKEYKCKVSNKALPAPIEKTISKA | |
| | | KGQPREPQVYTLPPSREEMTKNQVSLWCLVKGFYPSDIAVEWESNGQPEN | |
| | | NYKTTPPVLDSDGSFFLYSKLTVDKSRWQQGNVFSCSVMHEALHNHYTQK | |
| | | SLSLSPGK | |
| | D2E7VL- | DIQMTQSPSSLSASVGDRVTITCRASQGIRNYLAWYQQKPGKAPKLLIYA | 61 |
| | linker- | ASTLQSGVPSRFSGSGSGTDFTLTISSLQPEDVATYYCQRYNRAPYTFGQ | |
| | MH2p | GTKVEIKRTAELPPKVSVFVPPRDGFFGNPRKSKLICKATGFSPRQIQVS | |
| | | WLREGKQVGSGVTTKQVQAEAKESGPTTYKVTSTLTIKESDWLGQSMFTC | |
| | | RVDHRGLTFQQNASSMC | |
| Herceptin- | Herceptin | EVQLVESGGGLVQPGGSLRLSCAASGFNIKDTYIHWVRQAPGKGLEWVAR | 62 |
| MH2n/p | VH- | IYPTNGYTRYADSVKGRFTISADTSKNTAYLQMNSLRAEDTAVYYCSRWG | |
| | linker- | GDGFYAMDYWGQGTLVTVSSASTELPPKVSVFVPPRDGFFGNPRKSELIC | |
| | MH2n- | EATGFSPRQIQVSWLREGKQVGSGVTTDQVQAEAKESGPTTYDVTSTLTI | |
| | Hinge- | KESDWLGQSMFTCRVDHRGLTFQQNASSMCDKTHTCPPCPAPEAAGGPSV | |
| | CH2-CH3 | FLFPPKPKDTLMISRTPEVTCVVVDVSHEDPEVKFNWYVDGVEVHNAKTK | |
| | | PREEQYNSTYRVVSVLTVLHQDWLNGKEYKCKVSNKALPAPIEKTISKAK | |
| | | GQPREPQVYTLPPSREEMTKNQVSLWCLVKGFYPSDIAVEWESNGQPENN | |
| | | YKTTPPVLDSDGSFFLYSKLTVDKSRWQQGNVFSCSVMHEALHNHYTQKS | |
| | | LSLSPGK | |
| | Herceptin | DIQMTQSPSSLSASVGDRVTITCRASQDVNTAVAWYQQKPGKAPKLLIYS | 63 |
| | VL- | ASFLYSGVPSRFSGSRSGTDFTLTISSLQPEDFATYYCQQHYTTPPTFGQ | |
| | linker- | GTKVEIKRTAELPPKVSVFVPPRDGFFGNPRKSKLICKATGFSPRQIQVS | |
| | MH2p | WLREGKQVGSGVTTKQVQAEAKESGPTTYKVTSTLTIKESDWLGQSMFTC | |
| | | RVDHRGLTFQQNASSMC | |

[0162] All molecules were expressed in HEK293 cells and purified with MabSelect SuRe beads. Their molecular profiles were analyzed by SEC as shown in Table 6.

TABLE 6
Expression Of Bivalent Monospecific
Molecules Containing MH2 Domains

| | Octet Titer | Yield | SEC |
|---|---|---|---|
| Antibody ID | (mg/L) | (mg/L) | Monomer % |
| AB596-MH2n/p | 6.2 | 5.8 | 84.35 |
| D2E7-MH2n/p | 10.1 | 7.3 | 91.1 |
| Herceptin-MH2n/p | 7.4 | 8.5 | 80.8 |

### Example 9.2: Bivalent Monospecific Molecules Containing MH2 Domains Maintain the Binding Specificity and Affinity of their Parental Antibodies

[0163] The bivalent mono-specific molecules listed in Table 5 were tested in a FACS binding assay. Jurkat cells were used for testing CD3 binding. L929 cells were used for testing TNFα binding. N87 cells were used for testing HER2 binding. Cells were incubated with different concentrations of antibodies for 30 minutes and then incubated with fluorescence-conjugated secondary antibodies for another 30 minutes. Cells were then analyzed by flow cytometry and data was analyzed using FlowJo software. As shown in FIG. 14, bivalent mono-specific MH2n/p molecules retained binding affinity to the specific target comparable to the parental antibody.

### Example 9.3: Generation of Monospecific Molecules with Non-Glycosylated Wild Type or Engineered MH2 Domains

[0164] As described in Example 4, there is a glycosylation site at position 120 on wild type and engineered MH2 domains. Multiple mutations to remove this glycosylation site have been evaluated on the Herceptin-MH2n/p molecule. The expression levels of the mutated molecules are comparable with the wild type molecules as shown in Table 7. In addition to mutating Asparagine at position 120, the non-Serine or Threonine mutation at position 122 also can eliminate a glycosylation site in the MH2 domain Alanine mutation was evaluated on a D2E7-MH2n/p molecule. The glycosylation sites were removed without impact on binding properties. Using a non-glycosylated MH2 domain to replace a glycosylated MH2 domain modulates the number of additional glycosylation sites (0-4) introduced by a MH2 domain.

TABLE 7
Expression Titer of the Non-Glycosylated Bivalent
Monospecific Molecules Containing MH2 Domains

| μg/ml | LC WT | LC N-A | LC N-G | LC N-S | LC N-Q |
|---|---|---|---|---|---|
| HC WT | 0.165 | 0.176 | 0.165 | 0.188 | 0.165 |
| HC N-A | 0.259 | 0.188 | 0.165 | 0.165 | 0.165 |
| HC N-G | 0.282 | 0.165 | 0.165 | 0.165 | 0.176 |
| HC N-S | 1.000 | 0.224 | 0.165 | 0.188 | 0.165 |
| HC N-Q | 0.965 | 0.294 | 0.165 | 0.212 | 0.165 |

### Example 10: Generation of Bispecific Molecules with Wild Type MH2 Homodimer or Engineered MH2a/MH2b Heterodimer

[0165] Table 8 summarizes 10 possible combinations to build bispecific molecules using MH2/MH2, MH2p/MH2n, or MH2k/MH2h domains in a knobs-into-holes format. In each, VH1 and VL1 are from one antibody, while VH2 and VL2 are from another antibody. Each bispecific molecule is generated with four chains: 2 heavy chains (chain 1 and chain 3) and 2 light chains (chain 2 and chain 4).

TABLE 8
Combinations of 4 Chains To Generate Bispecific
Molecules Using MH2/MH2, MH2p/MH2n, Or MH2k/MH2h
Dimer In Knobs-Into-Holes Format

| | Bispecific IgG Chain Combination | | | |
|---|---|---|---|---|
| | Chain 1 | Chain 2 | Chain 3 | Chain 4 |
| 1 | VH1-linker- | VL1-linker- | VH2-CH1-hinge- | VL2-Cκ (λ) |
| | MH2-hinge- | MH2 | CH2—CH3 | |
| | CH2—CH3 | | (holes) | |
| | (knobs) | | | |
| 2 | VH1-linker- | VL1-linker- | VH2-CH1-hinge- | VL2- Cκ (λ) |
| | MH2p-hinge- | MH2n | CH2—CH3 | |
| | CH2—CH3 | | (holes) | |
| | (knobs) | | | |
| 3 | VH1-linker- | VL1-linker- | VH2-CH1-hinge- | VL2- Cκ (λ) |
| | MH2n-hinge- | MH2p | CH2—CH3 | |
| | CH2—CH3 | | (holes) | |
| | (knobs) | | | |
| 4 | VH1-linker- | VL1-linker- | VH2-CH1-hinge- | VL2- Cκ (λ) |
| | MH2k-hinge- | MH2h | CH2—CH3 | |
| | CH2—CH3 | | (holes) | |
| | (knobs) | | | |
| 5 | VH1-linker- | VL1-linker- | VH2-CH1-hinge- | VL2- Cκ (λ) |
| | MH2h-hinge- | MH2k | CH2—CH3 | |
| | CH2—CH3 | | (holes) | |
| | (knobs) | | | |
| 6 | VH1-linker- | VL1-linker- | VH2-CH1-hinge- | VL2- Cκ (λ) |
| | MH2-hinge- | MH2 | CH2—CH3 | |
| | CH2—CH3 | | (knobs) | |
| | (holes) | | | |
| 7 | VH1-linker- | VL1-linker- | VH2-CH1-hinge- | VL2- Cκ (λ) |
| | MH2p-hinge- | MH2n | CH2—CH3 | |
| | CH2—CH3 | | (knobs) | |
| | (holes) | | | |
| 8 | VH1-linker- | VL1-linker- | VH2-CH1-hinge- | VL2- Cκ (λ) |
| | MH2n-hinge- | MH2p | CH2—CH3 | |
| | CH2—CH3 | | (knobs) | |
| | (holes) | | | |
| 9 | VH1-linker- | VL1-linker- | VH2-CH1-hinge- | VL2- Cκ (λ) |
| | MH2k-hinge- | MH2h | CH2—CH3 | |
| | CH2—CH3 | | (knobs) | |
| | (holes) | | | |
| 10 | VH1-linker- | VL1-linker- | VH2-CH1-hinge- | VL2- Cκ (λ) |
| | MH2h-hinge- | MH2k | CH2—CH3 | |
| | CH2—CH3 | | (knobs) | |
| | (holes) | | | |

### Example 10.1: Generation of Bispecific Molecules with Wild Type MH2 Homodimer or Engineered MH2a/MH2b Heterodimer

[0166] Five bispecific molecules were generated based on the chain combinations 1-5 listed in Table 8, where VH1 and VL1 are from one anti-HER2 antibody Herceptin (Herceptin VH and Herceptin VK), and VH2 and VL2 are from an anti-EGFR antibody Cetuximab (Cetuximab VH and Cetuximab VL), listed in Table 9. One original knobs-into-holes bispecific antibody, and one anti-Her2 Herceptin halfbody were also generated for comparison. Table 10 summarizes the sequence of 4 chains for each of the bispecific molecules and halfbodies that have been generated.

TABLE 9
Antibody Variable Domains Used To Build Bispecific Molecules Containing MH2
Domains

| | | | SEQ |
|---|---|---|---|
| Antibody | | Variable Domain Sequence | ID |
| Target | Domain | 12345678901234567890123456789012345678901234567890 | NO: |
| HER2 | Herceptin | EVQLVESGGGLVQPGGSLRLSCAASGFNIKDTYIHWVRQAPGKGLEWVAR | 64 |
| (Herceptin) | VH | IYPTNGYTRYADSVKGRFTISADTSKNTAYLQMNSLRAEDTAVYYCSRWG | |
| | | GDGFYAMDYWGQGTLVTVSS | |
| | Herceptin | DIQMTQSPSSLSASVGDRVTITCRASQDVNTAVAWYQQKPGKAPKLLIYS | 65 |
| | VK | ASFLYSGVPSRFSGSRSGTDFTLTISSLQPEDFATYYCQQHYTTPPTFGQ | |
| | | GTKVEIK | |
| EGFR | Cetuximab | QVQLKQSGPGLVQPSQSLSITCTVSGFSLTNYGVHWVRQSPGKGLEWLGV | 66 |
| (Cetuximab) | VH | IWSGGNTDYNTPFTSRLSINKDNSKSQVFFKMNSLQSNDTAIYYCARALT | |
| | | YYDYEFAYWGQGTLVTVSA | |
| | Cetuximab | DILLTQSPVILSVSPGERVSFSCRASQSIGTNIHWYQQRTNGSPRLLIKY | 67 |
| | VK | ASESISGIPSRFSGSGSGTDFTLSINSVESEDIADYYCQQNNNWPTTFGA | |
| | | GTKLELK | |

TABLE 10
Sequences Of Generated Bispecific Molecules containing MH2 domains And Halfbodies

| | | | SEQ |
|---|---|---|---|
| Bispecific | | Sequence | ID |
| Molecules | Chain | 12345678901234567890123456789012345678901234567890 | NO: |
| BMH6 | Herceptin | EVQLVESGGGLVQPGGSLRLSCAASGFNIKDTYIHWVRQAPGKGLEWVAR | 68 |
| | VH-linker- | IYPTNGYTRYADSVKGRFTISADTSKNTAYLQMNSLRAEDTAVYYCSRWG | |
| | MH2-hinge- | GDGFYAMDYWGQGTLVTVSSASTELPPKVSVFVPPRDGFFGNPRKSKLIC | |
| | CH2- | QATGFSPRQIQVSWLREGKQVGSGVTTDQVQAEAKESGPTTYKVTSTLTI | |
| | CH3(knobs) | KESDWLGQSMFTCRVDHRGLTFQQNASSMCDKTHTCPPCPAPELLGGPSV | |
| | | FLFPPKPKDTLMISRTPEVTCVVVDVSHEDPEVKFNWYVDGVEVHNAKTK | |
| | | PREEQYNSTYRVVSVLTVLHQDWLNGKEYKCKVSNKALPAPIEKTISKAK | |
| | | GQPREPQVYTLPPSREEMTKNQVSLWCLVKGFYPSDIAVEWESNGQPENN | |
| | | YKTTPPVLDSDGSFFLYSKLTVDKSRWQQGNVFSCSVMHEALHNHYTQKS | |
| | | LSLSPGK | |
| | Herceptin | DIQMTQSPSSLSASVGDRVTITCRASQDVNTAVAWYQQKPGKAPKLLIYS | 69 |
| | VK-linker- | ASFLYSGVPSRFSGSRSGTDFTLTISSLQPEDFATYYCQQHYTTPPTFGQ | |
| | MH2 | GTKVEIKRTAELPPKVSVFVPPRDGFFGNPRKSKLICQATGFSPRQIQVS | |
| | | WLREGKQVGSGVTTDQVQAEAKESGPTTYKVTSTLTIKESDWLGQSMFTC | |
| | | RVDHRGLTFQQNASSMC | |
| | Cetuximab | QVQLKQSGPGLVQPSQSLSITCTVSGFSLTNYGVHWVRQSPGKGLEWLGV | 70 |
| | VH-CH1- | IWSGGNTDYNTPFTSRLSINKDNSKSQVFFKMNSLQSNDTAIYYCARALT | |
| | hinge-CH2- | YYDYEFAYWGQGTLVTVSAASTKGPSVFPLAPSSKSTSGGTAALGCLVKD | |
| | CH3(holes) | YFPEPVTVSWNSGALTSGVHTFPAVLQSSGLYSLSSVVTVPSSSLGTQTY | |
| | | ICNVNHKPSNTKVDKKVEPKSCDKTHTCPPCPAPELLGGPSVFLFPPKPK | |
| | | DTLMISRTPEVTCVVVDVSHEDPEVKFNWYVDGVEVHNAKTKPREEQYNS | |
| | | TYRVVSVLTVLHQDWLNGKEYKCKVSNKALPAPIEKTISKAKGQPREPQV | |
| | | YTLPPSREEMTKNQVSLSCAVKGFYPSDIAVEWESNGQPENNYKTTPPVL | |
| | | DSDGSFFLVSKLTVDKSRWQQGNVFSCSVMHEALHNHYTQKSLSLSPGK | |
| | Cetuximab | DILLTQSPVILSVSPGERVSFSCRASQSIGTNIHWYQQRTNGSPRLLIKY | 71 |
| | VK-Cκ | ASESISGIPSRFSGSGSGTDFTLSINSVESEDIADYYCQQNNNWPTTFGA | |
| | | GTKLELKRTVAAPSVFIFPPSDEQLKSGTASVVCLLNNFYPREAKVQWKV | |
| | | DNALQSGNSQESVTEQDSKDSTYSLSSTLTLSKADYEKHKVYACEVTHQG | |
| | | LSSPVTKSFNRGEC | |
| BMH7 | HerceptinVH- | EVQLVESGGGLVQPGGSLRLSCAASGFNIKDTYIHWVRQAPGKGLEWVAR | 72 |
| | linker-MH2n- | IYPTNGYTRYADSVKGRFTISADTSKNTAYLQMNSLRAEDTAVYYCSRWG | |
| | hinge-CH2- | GDGFYAMDYWGQGTLVTVSSASTELPPKVSVFVPPRDGFFGNPRKSELIC | |
| | CH3(knobs) | EATGFSPRQIQVSWLREGKQVGSGVTTDQVQAEAKESGPTTYDVTSTLTI | |
| | | KESDWLGQSMFTCRVDHRGLTFQQNASSMCDKTHTCPPCPAPELLGGPSV | |
| | | FLFPPKPKDTLMISRTPEVTCVVVDVSHEDPEVKFNWYVDGVEVHNAKTK | |
| | | PREEQYNSTYRVVSVLTVLHQDWLNGKEYKCKVSNKALPAPIEKTISKAK | |
| | | GQPREPQVYTLPPSREEMTKNQVSLWCLVKGFYPSDIAVEWESNGQPENN | |
| | | YKTTPPVLDSDGSFFLYSKLTVDKSRWQQGNVFSCSVMHEALHNHYTQKS | |
| | | LSLSPGK | |
| | Herceptin | DIQMTQSPSSLSASVGDRVTITCRASQDVNTAVAWYQQKPGKAPKLLIYS | 73 |
| | VK-linker- | ASFLYSGVPSRFSGSRSGTDFTLTISSLQPEDFATYYCQQHYTTPPTFGQ | |
| | MH2p | GTKVEIKRTAELPPKVSVFVPPRDGFFGNPRKSKLICKATGFSPRQIQVS | |
| | | WLREGKQVGSGVTTKQVQAEAKESGPTTYKVTSTLTIKESDWLGQSMFTC | |
| | | RVDHRGLTFQQNASSMC | |
| | Cetuximab | QVQLKQSGPGLVQPSQSLSITCTVSGFSLTNYGVHWVRQSPGKGLEWLGV | 74 |
| | VH-CH1- | IWSGGNTDYNTPFTSRLSINKDNSKSQVFFKMNSLQSNDTAIYYCARALT | |
| | hinge-CH2- | YYDYEFAYWGQGTLVTVSAASTKGPSVFPLAPSSKSTSGGTAALGCLVKD | |
| | CH3(holes) | YFPEPVTVSWNSGALTSGVHTFPAVLQSSGLYSLSSVVTVPSSSLGTQTY | |
| | | ICNVNHKPSNTKVDKKVEPKSCDKTHTCPPCPAPELLGGPSVFLFPPKPK | |
| | | DTLMISRTPEVTCVVVDVSHEDPEVKFNWYVDGVEVHNAKTKPREEQYNS | |
| | | TYRVVSVLTVLHQDWLNGKEYKCKVSNKALPAPIEKTISKAKGQPREPQV | |
| | | YTLPPSREEMTKNQVSLSCAVKGFYPSDIAVEWESNGQPENNYKTTPPVL | |
| | | DSDGSFFLVSKLTVDKSRWQQGNVFSCSVMHEALHNHYTQKSLSLSPGK | |
| | Cetuximab | DILLTQSPVILSVSPGERVSFSCRASQSIGTNIHWYQQRTNGSPRLLIKY | 75 |
| | VK-Cκ | ASESISGIPSRFSGSGSGTDFTLSINSVESEDIADYYCQQNNNWPTTFGA | |
| | | GTKLELKRTVAAPSVFIFPPSDEQLKSGTASVVCLLNNFYPREAKVQWKV | |
| | | DNALQSGNSQESVTEQDSKDSTYSLSSTLTLSKADYEKHKVYACEVTHQG | |
| | | LSSPVTKSFNRGEC | |
| BMH8 | Herceptin | EVQLVESGGGLVQPGGSLRLSCAASGFNIKDTYIHWVRQAPGKGLEWVAR | 76 |
| | VH-linker- | IYPTNGYTRYADSVKGRFTISADTSKNTAYLQMNSLRAEDTAVYYCSRWG | |
| | MH2p-hinge- | GDGFYAMDYWGQGTLVTVSSASTELPPKVSVFVPPRDGFFGNPRKSKLIC | |
| | CH2- | KATGFSPRQIQVSWLREGKQVGSGVTTKQVQAEAKESGPTTYKVTSTLTI | |
| | CH3(knobs) | KESDWLGQSMFTCRVDHRGLTFQQNASSMCDKTHTCPPCPAPELLGGPSV | |
| | | FLFPPKPKDTLMISRTPEVTCVVVDVSHEDPEVKFNWYVDGVEVHNAKTK | |
| | | PREEQYNSTYRVVSVLTVLHQDWLNGKEYKCKVSNKALPAPIEKTISKAK | |
| | | GQPREPQVYTLPPSREEMTKNQVSLWCLVKGFYPSDIAVEWESNGQPENN | |
| | | YKTTPPVLDSDGSFFLYSKLTVDKSRWQQGNVFSCSVMHEALHNHYTQKS | |
| | | LSLSPGK | |
| | Herceptin | DIQMTQSPSSLSASVGDRVTITCRASQDVNTAVAWYQQKPGKAPKLLIYS | 77 |
| | VK-linker- | ASFLYSGVPSRFSGSRSGTDFTLTISSLQPEDFATYYCQQHYTTPPTFGQ | |
| | MH2n | GTKVEIKRTAELPPKVSVFVPPRDGFFGNPRKSELICEATGFSPRQIQVS | |
| | | WLREGKQVGSGVTTDQVQAEAKESGPTTYDVTSTLTIKESDWLGQSMFTC | |
| | | RVDHRGLTFQQNASSMC | |
| | Cetuximab | QVQLKQSGPGLVQPSQSLSITCTVSGFSLTNYGVHWVRQSPGKGLEWLGV | 78 |
| | VH-CH1- | IWSGGNTDYNTPFTSRLSINKDNSKSQVFFKMNSLQSNDTAIYYCARALT | |
| | hinge-CH2- | YYDYEFAYWGQGTLVTVSAASTKGPSVFPLAPSSKSTSGGTAALGCLVKD | |
| | CH3(holes) | YFPEPVTVSWNSGALTSGVHTFPAVLQSSGLYSLSSVVTVPSSSLGTQTY | |
| | | ICNVNHKPSNTKVDKKVEPKSCDKTHTCPPCPAPELLGGPSVFLFPPKPK | |
| | | DTLMISRTPEVTCVVVDVSHEDPEVKFNWYVDGVEVHNAKTKPREEQYNS | |
| | | TYRVVSVLTVLHQDWLNGKEYKCKVSNKALPAPIEKTISKAKGQPREPQV | |
| | | YTLPPSREEMTKNQVSLSCAVKGFYPSDIAVEWESNGQPENNYKTTPPVL | |
| | | DSDGSFFLVSKLTVDKSRWQQGNVFSCSVMHEALHNHYTQKSLSLSPGK | |
| | Cetuximab | DILLTQSPVILSVSPGERVSFSCRASQSIGTNIHWYQQRTNGSPRLLIKY | 79 |
| | VK-Cκ | ASESISGIPSRFSGSGSGTDFTLSINSVESEDIADYYCQQNNNWPTTFGA | |
| | | GTKLELKRTVAAPSVFIFPPSDEQLKSGTASVVCLLNNFYPREAKVQWKV | |
| | | DNALQSGNSQESVTEQDSKDSTYSLSSTLTLSKADYEKHKVYACEVTHQG | |
| | | LSSPVTKSFNRGEC | |
| BMH9 | Herceptin | EVQLVESGGGLVQPGGSLRLSCAASGFNIKDTYIHWVRQAPGKGLEWVAR | 80 |
| | VH-linker- | IYPTNGYTRYADSVKGRFTISADTSKNTAYLQMNSLRAEDTAVYYCSRWG | |
| | MH2h-hinge- | GDGFYAMDYWGQGTLVTVSSASTELPPKVSVFVPPRDGFFGNPRKSKLAC | |
| | CH2- | SATGFSPRQIQVSWLREGKQVGSGVTTDQVQAEAKESGPTTYKVASTLTI | |
| | CH3(knobs) | KESDWLGQSMFTCRVDHRGLTFQQNASSMCDKTHTCPPCPAPELLGGPSV | |
| | | FLFPPKPKDTLMISRTPEVTCVVVDVSHEDPEVKFNWYVDGVEVHNAKTK | |
| | | PREEQYNSTYRVVSVLTVLHQDWLNGKEYKCKVSNKALPAPIEKTISKAK | |
| | | GQPREPQVYTLPPSREEMTKNQVSLWCLVKGFYPSDIAVEWESNGQPENN | |
| | | YKTTPPVLDSDGSFFLYSKLTVDKSRWQQGNVFSCSVMHEALHNHYTQKS | |
| | | LSLSPGK | |
| | Herceptin | DIQMTQSPSSLSASVGDRVTITCRASQDVNTAVAWYQQKPGKAPKLLIYS | 81 |
| | VK-linker- | ASFLYSGVPSRFSGSRSGTDFTLTISSLQPEDFATYYCQQHYTTPPTFGQ | |
| | MH2k | GTKVEIKRTAELPPKVSVFVPPRDGFFGNPRKSKLWCQATGFSPRQIQVS | |
| | | WLREGKQVGSGVTTDQVQAEAKESGPTTYKVTSTLTIKESDWLGQSMFTC | |
| | | RVDHRGLTFQQNASSMC | |
| | Cetuximab | QVQLKQSGPGLVQPSQSLSITCTVSGFSLTNYGVHWVRQSPGKGLEWLGV | 82 |
| | VH-CH1- | IWSGGNTDYNTPFTSRLSINKDNSKSQVFFKMNSLQSNDTAIYYCARALT | |
| | hinge-CH2- | YYDYEFAYWGQGTLVTVSAASTKGPSVFPLAPSSKSTSGGTAALGCLVKD | |
| | CH3(holes) | YFPEPVTVSWNSGALTSGVHTFPAVLQSSGLYSLSSVVTVPSSSLGTQTY | |
| | | ICNVNHKPSNTKVDKKVEPKSCDKTHTCPPCPAPELLGGPSVFLFPPKPK | |
| | | DTLMISRTPEVTCVVVDVSHEDPEVKFNWYVDGVEVHNAKTKPREEQYNS | |
| | | TYRVVSVLTVLHQDWLNGKEYKCKVSNKALPAPIEKTISKAKGQPREPQV | |
| | | YTLPPSREEMTKNQVSLSCAVKGFYPSDIAVEWESNGQPENNYKTTPPVL | |
| | | DSDGSFFLVSKLTVDKSRWQQGNVFSCSVMHEALHNHYTQKSLSLSPGK | |
| | Cetuximab | DILLTQSPVILSVSPGERVSFSCRASQSIGTNIHWYQQRTNGSPRLLIKY | 83 |
| | VK-Cκ | ASESISGIPSRFSGSGSGTDFTLSINSVESEDIADYYCQQNNNWPTTFGA | |
| | | GTKLELKRTVAAPSVFIFPPSDEQLKSGTASVVCLLNNFYPREAKVQWKV | |
| | | DNALQSGNSQESVTEQDSKDSTYSLSSTLTLSKADYEKHKVYACEVTHQG | |
| | | LSSPVTKSFNRGEC | |
| BMH10 | Herceptin | EVQLVESGGGLVQPGGSLRLSCAASGFNIKDTYIHWVRQAPGKGLEWVAR | 84 |
| | VH-linker- | IYPTNGYTRYADSVKGRFTISADTSKNTAYLQMNSLRAEDTAVYYCSRWG | |
| | MH2k-hinge- | GDGFYAMDYWGQGTLVTVSSASTELPPKVSVFVPPRDGFFGNPRKSKLWC | |
| | CH2- | QATGFSPRQIQVSWLREGKQVGSGVTTDQVQAEAKESGPTTYKVTSTLTI | |
| | CH3(knobs) | KESDWLGQSMFTCRVDHRGLTFQQNASSMCDKTHTCPPCPAPELLGGPSV | |
| | | FLFPPKPKDTLMISRTPEVTCVVVDVSHEDPEVKFNWYVDGVEVHNAKTK | |
| | | PREEQYNSTYRVVSVLTVLHQDWLNGKEYKCKVSNKALPAPIEKTISKAK | |
| | | GQPREPQVYTLPPSREEMTKNQVSLWCLVKGFYPSDIAVEWESNGQPENN | |
| | | YKTTPPVLDSDGSFFLYSKLTVDKSRWQQGNVFSCSVMHEALHNHYTQKS | |
| | | LSLSPGK | |
| | Herceptin | DIQMTQSPSSLSASVGDRVTITCRASQDVNTAVAWYQQKPGKAPKLLIYS | 85 |
| | VK-linker- | ASFLYSGVPSRFSGSRSGTDFTLTISSLQPEDFATYYCQQHYTTPPTFGQ | |
| | MH2h | GTKVEIKRTAELPPKVSVFVPPRDGFFGNPRKSKLACSATGFSPRQIQVS | |
| | | WLREGKQVGSGVTTDQVQAEAKESGPTTYKVASTLTIKESDWLGQSMFTC | |
| | | RVDHRGLTFQQNASSMC | |
| | Cetuximab | QVQLKQSGPGLVQPSQSLSITCTVSGFSLTNYGVHWVRQSPGKGLEWLGV | 86 |
| | VH-CH1- | IWSGGNTDYNTPFTSRLSINKDNSKSQVFFKMNSLQSNDTAIYYCARALT | |
| | hinge-CH2- | YYDYEFAYWGQGTLVTVSAASTKGPSVFPLAPSSKSTSGGTAALGCLVKD | |
| | CH3(holes) | YFPEPVTVSWNSGALTSGVHTFPAVLQSSGLYSLSSVVTVPSSSLGTQTY | |
| | | ICNVNHKPSNTKVDKKVEPKSCDKTHTCPPCPAPELLGGPSVFLFPPKPK | |
| | | DTLMISRTPEVTCVVVDVSHEDPEVKFNWYVDGVEVHNAKTKPREEQYNS | |
| | | TYRVVSVLTVLHQDWLNGKEYKCKVSNKALPAPIEKTISKAKGQPREPQV | |
| | | YTLPPSREEMTKNQVSLSCAVKGFYPSDIAVEWESNGQPENNYKTTPPVL | |
| | | DSDGSFFLVSKLTVDKSRWQQGNVFSCSVMHEALHNHYTQKSLSLSPGK | |
| | Cetuximab | DILLTQSPVILSVSPGERVSFSCRASQSIGTNIHWYQQRTNGSPRLLIKY | 87 |
| | VK-Cκ | ASESISGIPSRFSGSGSGTDFTLSINSVESEDIADYYCQQNNNWPTTFGA | |
| | | GTKLELKRTVAAPSVFIFPPSDEQLKSGTASVVCLLNNFYPREAKVQWKV | |
| | | DNALQSGNSQESVTEQDSKDSTYSLSSTLTLSKADYEKHKVYACEVTHQG | |
| | | LSSPVTKSFNRGEC | |
| KIH2 | Herceptin | EVQLVESGGGLVQPGGSLRLSCAASGFNIKDTYIHWVRQAPGKGLEWVAR | 88 |
| | VH-CH1- | IYPTNGYTRYADSVKGRFTISADTSKNTAYLQMNSLRAEDTAVYYCSRWG | |
| | hinge-CH2- | GDGFYAMDYWGQGTLVTVSSASTKGPSVFPLAPSSKSTSGGTAALGCLVK | |
| | CH3(knobs) | DYFPEPVTVSWNSGALTSGVHTFPAVLQSSGLYSLSSVVTVPSSSLGTQT | |
| | | YICNVNHKPSNTKVDKKVEPKSCDKTHTCPPCPAPELLGGPSVFLFPPKP | |
| | | KDTLMISRTPEVTCVVVDVSHEDPEVKFNWYVDGVEVHNAKTKPREEQYN | |
| | | STYRVVSVLTVLHQDWLNGKEYKCKVSNKALPAPIEKTISKAKGQPREPQ | |
| | | VYTLPPSREEMTKNQVSLWCLVKGFYPSDIAVEWESNGQPENNYKTTPPV | |
| | | LDSDGSFFLYSKLTVDKSRWQQGNVFSCSVMHEALHNHYTQKSLSLSPGK | |
| | Herceptin | DIQMTQSPSSLSASVGDRVTITCRASQDVNTAVAWYQQKPGKAPKLLIYS | 89 |
| | VK-CK | ASFLYSGVPSRFSGSRSGTDFTLTISSLQPEDFATYYCQQHYTTPPTFGQ | |
| | | GTKVEIKRTVAAPSVFIFPPSDEQLKSGTASVVCLLNNFYPREAKVQWKV | |
| | | DNALQSGNSQESVTEQDSKDSTYSLSSTLTLSKADYEKHKVYACEVTHQG | |
| | | LSSPVTKSFNRGEC | |
| | Cetuximab | QVQLKQSGPGLVQPSQSLSITCTVSGFSLTNYGVHWVRQSPGKGLEWLGV | 90 |
| | VH-CH1- | IWSGGNTDYNTPFTSRLSINKDNSKSQVFFKMNSLQSNDTAIYYCARALT | |
| | hinge-CH2- | YYDYEFAYWGQGTLVTVSAASTKGPSVFPLAPSSKSTSGGTAALGCLVKD | |
| | CH3(holes) | YFPEPVTVSWNSGALTSGVHTFPAVLQSSGLYSLSSVVTVPSSSLGTQTY | |
| | | ICNVNHKPSNTKVDKKVEPKSCDKTHTCPPCPAPELLGGPSVFLFPPKPK | |
| | | DTLMISRTPEVTCVVVDVSHEDPEVKFNWYVDGVEVHNAKTKPREEQYNS | |
| | | TYRVVSVLTVLHQDWLNGKEYKCKVSNKALPAPIEKTISKAKGQPREPQV | |
| | | YTLPPSREEMTKNQVSLSCAVKGFYPSDIAVEWESNGQPENNYKTTPPVL | |
| | | DSDGSFFLVSKLTVDKSRWQQGNVFSCSVMHEALHNHYTQKSLSLSPGK | |
| | Cetuximab | DILLTQSPVILSVSPGERVSFSCRASQSIGTNIHWYQQRTNGSPRLLIKY | 91 |
| | VK-Cκ | ASESISGIPSRFSGSGSGTDFTLSINSVESEDIADYYCQQNNNWPTTFGA | |
| | | GTKLELKRTVAAPSVFIFPPSDEQLKSGTASVVCLLNNFYPREAKVQWKV | |
| | | DNALQSGNSQESVTEQDSKDSTYSLSSTLTLSKADYEKHKVYACEVTHQG | |
| | | LSSPVTKSFNRGEC | |
| Half- | Herceptin | EVQLVESGGGLVQPGGSLPISCAASGFNIKDTTIHWVRQAPGKGLEIVAR | 92 |
| Herceptin | VH-CH1- | IYPTNGYTRYADSVRGRFTISADTSKNTAYLQMNSLRAEDTAVYYCSRWG | |
| | hinge-CH2- | GDGFYANDYWGQGTLVTVSSASTKGPSVFPLAPSSKSTSGGTAALGCLVK | |
| | CH3(halfbody) | DYFPEPVTVSWNSGALTSGVHTFPAVLQSSGLYSLSSVVTVPSSSLGTQT | |
| | | YICNVNHKPSNTKVDKKVEPKSCDKTHTSPPSPAPELLGGPSVFLFPPKP | |
| | | KDTLMISRTPEVTCVVVDVSHEDPEVKFNWYVDGVEVHNAKTKPREEQYN | |
| | | STYRVVSVLTVLHQDWLNGKEYKCKVSNKALPAPIEKTISKAKGQPREPQ | |
| | | VYTLPPSREEMTKNQVSLTCLVKGFYPSDIAVEWESNGQPENNYKTTPPV | |
| | | LDSDGSFRLYSKLTVDKSRWQQGNVFSCSVMHEALHNHYTQKSLSLSPGK | |
| | Herceptin | DIQMTQSPSSLSASVGDRVTITCRASQDVNTAVAWYQQKPGKAPKLLIYS | 93 |
| | VK-CK | ASFLYSGVPSRFSGSRSGTDFTLTISSLQPEDFATYYCQQHYTTPPTFGQ | |
| | | GTKVEIKRTVAAPSVFIFPPSDEQLKSGTASVVCLLNNFYPREAKVQWKV | |
| | | DNALQSGNSQESVTEQDSKDSTYSLSSTLTLSKADYEKHKVYACEVTHQG | |
| | | LSSPVTKSFNRGEC | |

[0167] The MH2 domains (MH2, MH2n, MH2p, MH2h, and MH2k) were synthesized by Integrated DNA Technologies. To further stabilize the bispecific molecules, knobs-into-holes heterodimerization technology was utilized by introducing T366W (knobs) or T366S, L368A, and Y407V (holes) mutations into the CH3 domains of the antibody. Four chain vectors were used for each molecule. The anti-HER2 Herceptin VH domain and a selected MH2 domain were integrated into a pHybE huIgG1 vector with the knob mutation to form the knob heavy chain. The anti-HER2 Herceptin Vκ and the pairing MH2 domain were assembled and then introduced to a pHybE huCκ vector to form the corresponding light chain. The anti-EGFR VH and Vκ were incorporated into a pHybE huIgG1 vector with the hole mutations in CH3 domain and a pHybE huCκ vector, respectively. All cloning was completed with homologous recombination and transformation in DH5a cells. All bispecific molecules were expressed in HEK293 cells and purified with MabSelect SuRe beads. Their molecular profiles were analyzed by SEC and mass spectrometry. The SEC profile of each molecule is shown in FIG. 15.

TABLE 11
Expression Of Bispecific Molecules Containing
MH2 Domains and Halfbodies

| | Octet Titer | Yield | SEC |
|---|---|---|---|
| Antibody ID | (mg/L) | (mg/L) | Monomer % |
| BMH6(MH2WT) | 46 | 43.2 | 92.7 |
| BMH7(MH2n/p) | 18.6 | 20.1 | 89.5 |
| BMH8(MH2p/n) | 25.5 | 14.1 | 80.7 |
| BMH9(MH2h/k) | 27.8 | 16 | 81.4 |
| BMH10(MH2k/h) | 27.4 | 22.2 | 86.5 |
| KIH2 | 81.5 | 65.8 | 83.9 |
| Half-Herceptin | 150 | 82.4 | |

### Example 10.2: Bispecific BMH Molecules Eliminating the Mispairing Issue Between Light Chain and Heavy Chain

[0168] The molecular weight and identification of bispecific BMH and KIH molecules were determined by mass spec (MS) (Instrument: Agilent HPLC-TOF or HPLC-QTOF; Column: Vydac C4, CN#214MS5115, and CapTrap cartridge; Buffer A: 0.1% FA+0.01% TFA in H2O, buffer B: 0.1% FA+0.01% TFA in CAN; Flow rate: 50 μL/minute; Gradient: 5% buffer B for 5 minutes, 28% to 50% buffer B in 10 minutes, 50% to 95% buffer B in 10 minutes and back to 5% buffer B for 3 minutes for C4 column. 5% buffer B for 7 minutes, 100% buffer B for 7 minutes and back to 5% buffer B for 5 minutes for CapTrap cartridge; MS conditions: For reduced protein: gas temperature 350 C, drying gas 12 L/min, nebulizer 60 psg, fragmentor 350v, skimmer 75v, OCTI RF Vpp 750v, Vcap 5000v. For intact protein: gas temperature 300 C, drying gas 12 L/min, nebulizer 60 psg, fragmentor 350v, skimmer 85v, OCTI RF Vpp 750v, Vcap 5500v).

[0169] As shown in Table 12, 48% of paired heavy/light chains were mispaired in KIH2 molecule (33% Herceptin L/Cetuximab H and 15% Cetuximab L/Herceptin H). The % of mispaired heavy/light chain was reduced to 10% in BMH6 and to 0% in BMH7 and BMH8. In addition to eliminating heavy/light chain mispairing, there is enhanced heavy chain hetero-dimerization in BMH molecules. The percentage of heavy chain homo-dimer was reduced from 5% in KIH2 (4% knob-knob dimer and 1% hole-hole dimer) to 0% in BMH6, 2% in BMH7 (2% hole-hole dimer) and 0% in BMH8.

TABLE 12
Semi-Quantitative Analysis of Fab Formation in Bispecific Molecules by Mass Spec

| | Molecule | | | | | | | |
|---|---|---|---|---|---|---|---|---|
| | KIH2 | | BMH6 | | BMH7 | | BMH8 | |
| | Total | % of total | Total | % of total | Total | % of total | Total | % of total |
| Fragment | Abundance | Abundance | Abundance | Abundance | Abundance | Abundance | Abundance | Abundance |
| Herceptin | 1,488,958.90 | 40% | 1,459,845.50 | 51% | 747,249 | 33.40% | 599,491.30 | 30% |
| Fab | | | | | | | | |
| Cetuximab | 450,436.80 | 12% | 1,110,360.20 | 39% | 1,492,578 | 66.60% | 1,391,949.90 | 70% |
| Fab | | | | | | | | |
| Herceptin L/ | 1,216,982.60 | 33% | 179,288.60 | 6% | 0 | 0.00% | 0 | 0% |
| Cetuximab | | | | | | | | |
| H Fab | | | | | | | | |
| Cetuximab L/ | 549,515.30 | 15% | 114,531.70 | 4% | 0 | 0.00% | 0 | 0% |
| Herceptin | | | | | | | | |
| H Fab | | | | | | | | |
| Total of | 3,705,893.50 | 100% | 2,864,026.00 | 100% | 2,239,828 | 100.00% | 1,991,441.20 | 100% |
| Fabs | | | | | | | | |
| Fc knob- | 1,908,688.00 | 95% | 1,633,886.50 | 100% | 1,269,913 | 98.00% | 1,141,235.60 | 100% |
| hole | | | | | | | | |
| Fc knob- | 85,008.20 | 4% | 0 | 0% | 0 | 0.00% | 0 | 0% |
| knob | | | | | | | | |
| Fc hole- | 21,187.40 | 1% | 0 | 0% | 26,283 | 2.00% | 0 | 0% |
| hole | | | | | | | | |
| Total of | 2,014,883.50 | 100% | 1,633,886.50 | 100% | 1,296,196 | 100.00% | 1,141,235.60 | 100% |
| Fc | | | | | | | | |

### Example 10.3: Bispecific BMH Molecules Maintain Binding Specificity and Affinity

[0170] The bispecific BMH molecules listed in Table 10 were tested in a FACS binding assay. The KIH, monovalent Herceptin, and monovalent Cetuximab constructs were also tested for comparison. A431 cells were used for testing EGFR binding. N87 cells were used for testing HER2 binding. Cells were incubated with different concentrations of antibodies for 30 minutes and then incubated with fluorescence-conjugated secondary antibodies for another 30 minutes. Cells were then analyzed by flow cytometry and data was analyzed using FlowJo software.

[0171] As shown in FIG. 16, all BMH molecules bind to hEGFR on A431 cell with comparable affinity to the original knobs-into-hole bispecific molecule KIH2 and the monovalent Cetuximab in a Half-DVD-Cetux-CD3. As shown in FIG. 17, all BMH molecules bind to hHER2 on N87 cells with comparable affinity to the original knobs-into-holes bispecific molecules KIH2 and the monovalent Herceptin in half Herceptin.

### Example 10.4: Mutation to Knock Out Glycosylation Site on MH2 Domain

[0172] As described in Example 4, there is a glycosylation site at position 120 on wild type and engineered hetero-dimerization MH2 domains. In the MH2.S, MH2p.S, MH2n.S, MH2k.S, and MH2h.S domain listed in Table 2, residue Asparagine at position 120 is replaced by a serine residue. Using a non-glycosylated MH2 domain to replace a glycosylated MH2 domain modulates the number of additional glycosylation sites (0-4) introduced by using an MH2 domain. Table 13 summarizes bispecific molecules generated by using those non-glycosylated MH2 domains

TABLE 13
Sequences Of Bispecific Molecules With Non-Glycosylated MH2 Domains

| | | | SEQ |
|---|---|---|---|
| Bispecific | | Sequence | ID |
| Molecules | Chain | 12345678901234567890123456789012345678901234567890 | NO: |
| BMH6.S | Herceptin | EVQLVESGGGLVQPGGSLRLSCAASGFNIKDTYIHWVRQAPGKGLEWVAR | 94 |
| | VH-linker- | IYPTNGYTRYADSVKGRFTISADTSKNTAYLQMNSLRAEDTAVYYCSRWG | |
| | MH2.S-hinge- | GDGFYAMDYWGQGTLVTVSSASTELPPKVSVFVPPRDGFFGNPRKSKLIC | |
| | CH2- | QATGFSPRQIQVSWLREGKQVGSGVTTDQVQAEAKESGPTTYKVTSTLTI | |
| | CH3(knobs) | KESDWLGQSMFTCRVDHRGLTFQQSASSMCDKTHTCPPCPAPELLGGPSV | |
| | | FLFPPKPKDTLMISRTPEVTCVVVDVSHEDPEVKFNWYVDGVEVHNAKTK | |
| | | PREEQYNSTYRVVSVLTVLHQDWLNGKEYKCKVSNKALPAPIEKTISKAK | |
| | | GQPREPQVYTLPPSREEMTKNQVSLWCLVKGFYPSDIAVEWESNGQPENN | |
| | | YKTTPPVLDSDGSFFLYSKLTVDKSRWQQGNVFSCSVMHEALHNHYTQKS | |
| | | LSLSPGK | |
| | Herceptin | DIQMTQSPSSLSASVGDRVTITCRASQDVNTAVAWYQQKPGKAPKLLIYS | 95 |
| | VK-linker- | ASFLYSGVPSRFSGSRSGTDFTLTISSLQPEDFATYYCQQHYTTPPTFGQ | |
| | MH2.S | GTKVEIKRTAELPPKVSVFVPPRDGFFGNPRKSKLICQATGFSPRQIQVS | |
| | | WLREGKQVGSGVTTDQVQAEAKESGPTTYKVTSTLTIKESDWLGQSMFTC | |
| | | RVDHRGLTFQQSASSMC | |
| | Cetuximab | QVQLKQSGPGLVQPSQSLSITCTVSGFSLTNYGVHWVRQSPGKGLEWLGV | 96 |
| | VH-CH1- | IWSGGNTDYNTPFTSRLSINKDNSKSQVFFKMNSLQSNDTAIYYCARALT | |
| | hinge-CH2- | YYDYEFAYWGQGTLVTVSAASTKGPSVFPLAPSSKSTSGGTAALGCLVKD | |
| | CH3(holes) | YFPEPVTVSWNSGALTSGVHTFPAVLQSSGLYSLSSVVTVPSSSLGTQTY | |
| | | ICNVNHKPSNTKVDKKVEPKSCDKTHTCPPCPAPELLGGPSVFLFPPKPK | |
| | | DTLMISRTPEVTCVVVDVSHEDPEVKFNWYVDGVEVHNAKTKPREEQYNS | |
| | | TYRVVSVLTVLHQDWLNGKEYKCKVSNKALPAPIEKTISKAKGQPREPQV | |
| | | YTLPPSREEMTKNQVSLSCAVKGFYPSDIAVEWESNGQPENNYKTTPPVL | |
| | | DSDGSFFLVSKLTVDKSRWQQGNVFSCSVMHEALHNHYTQKSLSLSPGK | |
| | Cetuximab | DILLTQSPVILSVSPGERVSFSCRASQSIGTNIHWYQQRTNGSPRLLIKY | 97 |
| | VK-CK | ASESISGIPSRFSGSGSGTDFTLSINSVESEDIADYYCQQNNNWPTTFGA | |
| | | GTKLELKRTVAAPSVFIFPPSDEQLKSGTASVVCLLNNFYPREAKVQWKV | |
| | | DNALQSGNSQESVTEQDSKDSTYSLSSTLTLSKADYEKHKVYACEVTHQG | |
| | | LSSPVTKSFNRGEC | |
| BMH7.S | Herceptin | EVQLVESGGGLVQPGGSLRLSCAASGFNIKDTYIHWVRQAPGKGLEWVAR | 98 |
| | VH-linker- | IYPTNGYTRYADSVKGRFTISADTSKNTAYLQMNSLRAEDTAVYYCSRWG | |
| | MH2n-hinge- | GDGFYAMDYWGQGTLVTVSSASTELPPKVSVFVPPRDGFFGNPRKSELIC | |
| | CH2- | EATGFSPRQIQVSWLREGKQVGSGVTTDQVQAEAKESGPTTYDVTSTLTI | |
| | CH3(knobs) | KESDWLGQSMFTCRVDHRGLTFQQSASSMCDKTHTCPPCPAPELLGGPSV | |
| | | FLFPPKPKDTLMISRTPEVTCVVVDVSHEDPEVKFNWYVDGVEVHNAKTK | |
| | | PREEQYNSTYRVVSVLTVLHQDWLNGKEYKCKVSNKALPAPIEKTISKAK | |
| | | GQPREPQVYTLPPSREEMTKNQVSLWCLVKGFYPSDIAVEWESNGQPENN | |
| | | YKTTPPVLDSDGSFFLYSKLTVDKSRWQQGNVFSCSVMHEALHNHYTQKS | |
| | | LSLSPGK | |
| | Herceptin | DIQMTQSPSSLSASVGDRVTITCRASQDVNTAVAWYQQKPGKAPKLLIYS | 99 |
| | VK-linker- | ASFLYSGVPSRFSGSRSGTDFTLTISSLQPEDFATYYCQQHYTTPPTFGQ | |
| | MH2p | GTKVEIKRTAELPPKVSVFVPPRDGFFGNPRKSKLICKATGFSPRQIQVS | |
| | | WLREGKQVGSGVTTKQVQAEAKESGPTTYKVTSTLTIKESDWLGQSMFTC | |
| | | RVDHRGLTFQQSASSMC | |
| | Cetuximab | QVQLKQSGPGLVQPSQSLSITCTVSGFSLTNYGVHWVRQSPGKGLEWLGV | 100 |
| | VH-CH1- | IWSGGNTDYNTPFTSRLSINKDNSKSQVFFKMNSLQSNDTAIYYCARALT | |
| | hinge-CH2- | YYDYEFAYWGQGTLVTVSAASTKGPSVFPLAPSSKSTSGGTAALGCLVKD | |
| | CH3(holes) | YFPEPVTVSWNSGALTSGVHTFPAVLQSSGLYSLSSVVTVPSSSLGTQTY | |
| | | ICNVNHKPSNTKVDKKVEPKSCDKTHTCPPCPAPELLGGPSVFLFPPKPK | |
| | | DTLMISRTPEVTCVVVDVSHEDPEVKFNWYVDGVEVHNAKTKPREEQYNS | |
| | | TYRVVSVLTVLHQDWLNGKEYKCKVSNKALPAPIEKTISKAKGQPREPQV | |
| | | YTLPPSREEMTKNQVSLSCAVKGFYPSDIAVEWESNGQPENNYKTTPPVL | |
| | | DSDGSFFLVSKLTVDKSRWQQGNVFSCSVMHEALHNHYTQKSLSLSPGK | |
| | Cetuximab | DILLTQSPVILSVSPGERVSFSCRASQSIGTNIHWYQQRTNGSPRLLIKY | 101 |
| | VK-CK | ASESISGIPSRFSGSGSGTDFTLSINSVESEDIADYYCQQNNNWPTTFGA | |
| | | GTKLELKRTVAAPSVFIFPPSDEQLKSGTASVVCLLNNFYPREAKVQWKV | |
| | | DNALQSGNSQESVTEQDSKDSTYSLSSTLTLSKADYEKHKVYACEVTHQG | |
| | | LSSPVTKSFNRGEC | |
| BMH8.S | Herceptin | EVQLVESGGGLVQPGGSLRLSCAASGFNIKDTYIHWVRQAPGKGLEWVAR | 102 |
| | VH-linker- | IYPTNGYTRYADSVKGRFTISADTSKNTAYLQMNSLRAEDTAVYYCSRWG | |
| | MH2p.5- | GDGFYAMDYWGQGTLVTVSSASTELPPKVSVFVPPRDGFFGNPRKSKLIC | |
| | hinge-CH2- | KATGFSPRQIQVSWLREGKQVGSGVTTKQVQAEAKESGPTTYKVTSTLTI | |
| | CH3(knobs) | KESDWLGQSMFTCRVDHRGLTFQQSASSMCDKTHTCPPCPAPELLGGPSV | |
| | | FLFPPKPKDTLMISRTPEVTCVVVDVSHEDPEVKFNWYVDGVEVHNAKTK | |
| | | PREEQYNSTYRVVSVLTVLHQDWLNGKEYKCKVSNKALPAPIEKTISKAK | |
| | | GQPREPQVYTLPPSREEMTKNQVSLWCLVKGFYPSDIAVEWESNGQPENN | |
| | | YKTTPPVLDSDGSFFLYSKLTVDKSRWQQGNVFSCSVMHEALHNHYTQKS | |
| | | LSLSPGK | |
| | Herceptin | DIQMTQSPSSLSASVGDRVTITCRASQDVNTAVAWYQQKPGKAPKLLIYS | 103 |
| | VK-linker- | ASFLYSGVPSRFSGSRSGTDFTLTISSLQPEDFATYYCQQHYTTPPTFGQ | |
| | MH2n.S | GTKVEIKRTAELPPKVSVFVPPRDGFFGNPRKSELICEATGFSPRQIQVS | |
| | | WLREGKQVGSGVTTDQVQAEAKESGPTTYDVTSTLTIKESDWLGQSMFTC | |
| | | RVDHRGLTFQQSASSMC | |
| | Cetuximab | QVQLKQSGPGLVQPSQSLSITCTVSGFSLTNYGVHWVRQSPGKGLEWLGV | 104 |
| | VH-CH1- | IWSGGNTDYNTPFTSRLSINKDNSKSQVFFKMNSLQSNDTAIYYCARALT | |
| | hinge-CH2- | YYDYEFAYWGQGTLVTVSAASTKGPSVFPLAPSSKSTSGGTAALGCLVKD | |
| | CH3(holes) | YFPEPVTVSWNSGALTSGVHTFPAVLQSSGLYSLSSVVTVPSSSLGTQTY | |
| | | ICNVNHKPSNTKVDKKVEPKSCDKTHTCPPCPAPELLGGPSVFLFPPKPK | |
| | | DTLMISRTPEVTCVVVDVSHEDPEVKFNWYVDGVEVHNAKTKPREEQYNS | |
| | | TYRVVSVLTVLHQDWLNGKEYKCKVSNKALPAPIEKTISKAKGQPREPQV | |
| | | YTLPPSREEMTKNQVSLSCAVKGFYPSDIAVEWESNGQPENNYKTTPPVL | |
| | | DSDGSFFLVSKLTVDKSRWQQGNVFSCSVMHEALHNHYTQKSLSLSPGK | |
| | Cetuximab | DILLTQSPVILSVSPGERVSFSCRASQSIGTNIHWYQQRTNGSPRLLIKY | 105 |
| | VK-CK | ASESISGIPSRFSGSGSGTDFTLSINSVESEDIADYYCQQNNNWPTTFGA | |
| | | GTKLELKRTVAAPSVFIFPPSDEQLKSGTASVVCLLNNFYPREAKVQWKV | |
| | | DNALQSGNSQESVTEQDSKDSTYSLSSTLTLSKADYEKHKVYACEVTHQG | |
| | | LSSPVTKSFNRGEC | |
| BMH9.S | Herceptin | EVQLVESGGGLVQPGGSLRLSCAASGFNIKDTYIHWVRQAPGKGLEWVAR | 106 |
| | VH-linker- | IYPTNGYTRYADSVKGRFTISADTSKNTAYLQMNSLRAEDTAVYYCSRWG | |
| | MH2h.5- | GDGFYAMDYWGQGTLVTVSSASTELPPKVSVFVPPRDGFFGNPRKSKLAC | |
| | hinge-CH2- | SATGFSPRQIQVSWLREGKQVGSGVTTDQVQAEAKESGPTTYKVASTLTI | |
| | CH3(knobs) | KESDWLGQSMFTCRVDHRGLTFQQSASSMCDKTHTCPPCPAPELLGGPSV | |
| | | FLFPPKPKDTLMISRTPEVTCVVVDVSHEDPEVKFNWYVDGVEVHNAKTK | |
| | | PREEQYNSTYRVVSVLTVLHQDWLNGKEYKCKVSNKALPAPIEKTISKAK | |
| | | GQPREPQVYTLPPSREEMTKNQVSLWCLVKGFYPSDIAVEWESNGQPENN | |
| | | YKTTPPVLDSDGSFFLYSKLTVDKSRWQQGNVFSCSVMHEALHNHYTQKS | |
| | | LSLSPGK | |
| | Herceptin | DIQMTQSPSSLSASVGDRVTITCRASQDVNTAVAWYQQKPGKAPKLLIYS | 107 |
| | VK-linker- | ASFLYSGVPSRFSGSRSGTDFTLTISSLQPEDFATYYCQQHYTTPPTFGQ | |
| | MH2k.S | GTKVEIKRTAELPPKVSVFVPPRDGFFGNPRKSKLWCQATGFSPRQIQVS | |
| | | WLREGKQVGSGVTTDQVQAEAKESGPTTYKVTSTLTIKESDWLGQSMFTC | |
| | | RVDHRGLTFQQSASSMC | |
| | Cetuximab | QVQLKQSGPGLVQPSQSLSITCTVSGFSLTNYGVHWVRQSPGKGLEWLGV | 108 |
| | VH-CH1- | IWSGGNTDYNTPFTSRLSINKDNSKSQVFFKMNSLQSNDTAIYYCARALT | |
| | hinge-CH2- | YYDYEFAYWGQGTLVTVSAASTKGPSVFPLAPSSKSTSGGTAALGCLVKD | |
| | CH3(holes) | YFPEPVTVSWNSGALTSGVHTFPAVLQSSGLYSLSSVVTVPSSSLGTQTY | |
| | | ICNVNHKPSNTKVDKKVEPKSCDKTHTCPPCPAPELLGGPSVFLFPPKPK | |
| | | DTLMISRTPEVTCVVVDVSHEDPEVKFNWYVDGVEVHNAKTKPREEQYNS | |
| | | TYRVVSVLTVLHQDWLNGKEYKCKVSNKALPAPIEKTISKAKGQPREPQV | |
| | | YTLPPSREEMTKNQVSLSCAVKGFYPSDIAVEWESNGQPENNYKTTPPVL | |
| | | DSDGSFFLVSKLTVDKSRWQQGNVFSCSVMHEALHNHYTQKSLSLSPGK | |
| | Cetuximab | DILLTQSPVILSVSPGERVSFSCRASQSIGTNIHWYQQRTNGSPRLLIKY | 109 |
| | VK-CK | ASESISGIPSRFSGSGSGTDFTLSINSVESEDIADYYCQQNNNWPTTFGA | |
| | | GTKLELKRTVAAPSVFIFPPSDEQLKSGTASVVCLLNNFYPREAKVQWKV | |
| | | DNALQSGNSQESVTEQDSKDSTYSLSSTLTLSKADYEKHKVYACEVTHQG | |
| | | LSSPVTKSFNRGEC | |
| BMH10.S | Herceptin | EVQLVESGGGLVQPGGSLRLSCAASGFNIKDTYIHWVRQAPGKGLEWVAR | 110 |
| | VH-linker- | IYPTNGYTRYADSVKGRFTISADTSKNTAYLQMNSLRAEDTAVYYCSRWG | |
| | MH2k-hinge- | GDGFYAMDYWGQGTLVTVSSASTELPPKVSVFVPPRDGFFGNPRKSKLWC | |
| | CH2- | QATGFSPRQIQVSWLREGKQVGSGVTTDQVQAEAKESGPTTYKVTSTLTI | |
| | CH3(knobs) | KESDWLGQSMFTCRVDHRGLTFQQSASSMCDKTHTCPPCPAPELLGGPSV | |
| | | FLFPPKPKDTLMISRTPEVTCVVVDVSHEDPEVKFNWYVDGVEVHNAKTK | |
| | | PREEQYNSTYRVVSVLTVLHQDWLNGKEYKCKVSNKALPAPIEKTISKAK | |
| | | GQPREPQVYTLPPSREEMTKNQVSLWCLVKGFYPSDIAVEWESNGQPENN | |
| | | YKTTPPVLDSDGSFFLYSKLTVDKSRWQQGNVFSCSVMHEALHNHYTQKS | |
| | | LSLSPGK | |
| | Herceptin | DIQMTQSPSSLSASVGDRVTITCRASQDVNTAVAWYQQKPGKAPKLLIYS | 111 |
| | VK-linker- | ASFLYSGVPSRFSGSRSGTDFTLTISSLQPEDFATYYCQQHYTTPPTFGQ | |
| | MH2h | GTKVEIKRTAELPPKVSVFVPPRDGFFGNPRKSKLACSATGFSPRQIQVS | |
| | | WLREGKQVGSGVTTDQVQAEAKESGPTTYKVASTLTIKESDWLGQSMFTC | |
| | | RVDHRGLTFQQSASSMC | |
| | Cetuximab | QVQLKQSGPGLVQPSQSLSITCTVSGFSLTNYGVHWVRQSPGKGLEWLGV | 112 |
| | VH-CH1- | IWSGGNTDYNTPFTSRLSINKDNSKSQVFFKMNSLQSNDTAIYYCARALT | |
| | hinge-CH2- | YYDYEFAYWGQGTLVTVSAASTKGPSVFPLAPSSKSTSGGTAALGCLVKD | |
| | CH3(holes) | YFPEPVTVSWNSGALTSGVHTFPAVLQSSGLYSLSSVVTVPSSSLGTQTY | |
| | | ICNVNHKPSNTKVDKKVEPKSCDKTHTCPPCPAPELLGGPSVFLFPPKPK | |
| | | DTLMISRTPEVTCVVVDVSHEDPEVKFNWYVDGVEVHNAKTKPREEQYNS | |
| | | TYRVVSVLTVLHQDWLNGKEYKCKVSNKALPAPIEKTISKAKGQPREPQV | |
| | | YTLPPSREEMTKNQVSLSCAVKGFYPSDIAVEWESNGQPENNYKTTPPVL | |
| | | DSDGSFFLVSKLTVDKSRWQQGNVFSCSVMHEALHNHYTQKSLSLSPGK | |
| | Cetuximab | DILLTQSPVILSVSPGERVSFSCRASQSIGTNIHWYQQRTNGSPRLLIKY | 113 |
| | VK-Cκ | ASESISGIPSRFSGSGSGTDFTLSINSVESEDIADYYCQQNNNWPTTFGA | |
| | | GTKLELKRTVAAPSVFIFPPSDEQLKSGTASVVCLLNNFYPREAKVQWKV | |
| | | DNALQSGNSQESVTEQDSKDSTYSLSSTLTLSKADYEKHKVYACEVTHQG | |
| | | LSSPVTKSFNRGEC | |

[0173] The non-glycosylated MH2 domains were synthesized by Integrated DNA Technologies. To further stabilize the bispecific molecules, knobs-into-holes heterodimerization technology was utilized by introducing T366W (knobs) or T366S, L368A, and Y407V (holes) mutations into the CH3 domains of the antibody. Four chain vectors were used for each molecule. The anti-HER2 Herceptin VH domain and a selected MH2 domain were integrated into a pHybE huIgG1 vector with the knobs mutation to form the knob heavy chain. The anti-HER2 Herceptin Vκ and the pairing MH2 domain were assembled and then introduced to a pHybE huCκ vector to form the corresponding light chain. The anti-EGFR VH and Vκ were incorporated into a pHybE huIgG1 vector with the holes mutations in a CH3 domain to form the hole heavy chain and a pHybE huCκ vector, respectively. All cloning was completed with homologous recombination and transformation in DH5a cells. All bispecific molecules were expressed in HEK293 cells and purified with MabSelect SuRe beads. Their molecular profiles were analyzed by SEC and mass spectrometry.

### Example 11: Generation of Trispecific Molecules with Wild Type MH2 Homodimer or Engineered MH2a/MH2b Heterodimer

[0174] Table 14 summarizes ten exemplary combinations that can be used to build trispecific molecules using MH2/MH2, MH2p/MH2n, or MH2k/MH2h domains in a knobs-into-holes format. In each, VH1 and VL1 are the variable domains taken from one parental antibody, VH2 and VL2 are variable domains from another parental antibody, and VH3 and VL3 are variable domains from yet another antibody. Each trispecific molecule is generated with four chains: 2 heavy chains (chain 1 and chain 3) and 2 light chains (chain 2 and chain 4).

TABLE 14
Combinations of Four Chains That Generate Trispecific
Molecules Using MH2/MH2, MH2p/MH2n, Or MH2k/MH2h
Dimers In A Knobs-Into-Holes Format

| | Trispecific IgG Combination | | | |
|---|---|---|---|---|
| | Chain 1 | Chain 2 | Chain 3 | Chain 4 |
| 1 | VH1-linker- | VL1-linker- | VH2-linker- | VL2-linker- |
| | MH2-hinge- | MH2 | VH3-CH1-hinge- | VL3-Cκ (λ) |
| | CH2—CH3 | | CH2—CH3 | |
| | (knobs) | | (holes) | |
| 2 | VH1-linker- | VL1-linker- | VH2-linker- | VL2-linker- |
| | MH2p-hinge- | MH2n | VH3-CH1-hinge- | VL3-Cκ (λ) |
| | CH2—CH3 | | CH2—CH3 | |
| | (knobs) | | (holes) | |
| 3 | VH1-linker- | VL1-linker- | VH2-linker- | VL2-linker- |
| | MH2n-hinge- | MH2p | VH3-CH1-hinge- | VL3-Cκ (λ) |
| | CH2—CH3 | | CH2—CH3 | |
| | (knobs) | | (holes) | |
| 4 | VH1-linker- | VL1-linker- | VH2-linker- | VL2-linker- |
| | MH2k-hinge- | MH2h | VH3-CH1-hinge- | VL3-Cκ (λ) |
| | CH2—CH3 | | CH2—CH3 | |
| | (knobs) | | (holes) | |
| 5 | VH1-linker- | VL1-linker- | VH2-linker- | VL2-linker- |
| | MH2h-hinge- | MH2k | VH3-CH1-hinge- | VL3-Cκ (λ) |
| | CH2—CH3 | | CH2—CH3 | |
| | (knobs) | | (holes) | |
| 6 | VH1-linker- | VL1-linker- | VH2-linker- | VL2-linker- |
| | MH2-hinge- | MH2 | VH3-CH1-hinge- | VL3-Cκ (λ) |
| | CH2—CH3 | | CH2—CH3 | |
| | (holes) | | (knobs) | |
| 7 | VH1-linker- | VL1-linker- | VH2-linker- | VL2-linker- |
| | MH2p-hinge- | MH2n | VH3-CH1-hinge- | VL3-Cκ (λ) |
| | CH2—CH3 | | CH2—CH3 | |
| | (holes) | | (knobs) | |
| 8 | VH1-linker- | VL1-linker- | VH2-linker- | VL2-linker- |
| | MH2n-hinge- | MH2p | VH3-CH1-hinge- | VL3-Cκ (λ) |
| | CH2—CH3 | | CH2—CH3 | |
| | (holes) | | (knobs) | |
| 9 | VH1-linker- | VL1-linker- | VH2-linker- | VL2-linker- |
| | MH2k-hinge- | MH2h | VH3-CH1-hinge- | VL3-Cκ (λ) |
| | CH2—CH3 | | CH2—CH3 | |
| | (holes) | | (knobs) | |
| 10 | VH1-linker- | VL1-linker- | VH2-linker- | VL2-linker- |
| | MH2h-hinge- | MH2k | VH3-CH1-hinge- | VL3-Cκ (λ) |
| | CH2—CH3 | | CH2—CH3 | |
| | (holes) | | (knobs) | |

### Example 11.1: Generation of Trispecific Molecules with Wild Type MH2 Homodimer or Engineered MH2a/MH2b Heterodimer

[0175] The variable domain sequences used to generate the tri-specific molecules are listed in Table 15.

TABLE 15
Antibody Variable Domains Used To Build IgG-Like Molecules Containing
MH2 Domains

| Antibody | | Variable Domain Sequence | SEQ ID |
|---|---|---|---|
| Target | Domain | 1234567890123456789012345678901234567890 | NO: |
| EGFR | Cetuximab | QVQLKQSGPGLVQPSQSLSITCTVSGFSLTNYGVHWVRQS | 114 |
| (Cetuximab) | VH | PGKGLEWLGVIWSGGNTDYNTPFTSRLSINKDNSKSQVFF | |
| | | KMNSLQSNDTAIYYCARALTYYDYEFAYWGQGTLVTVSA | |
| | Cetuximab | DILLTQSPVILSVSPGERVSFSCRASQSIGTNIHWYQQRT | 115 |
| | VK | NGSPRLLIKYASESISGIPSRFSGSGSGTDFTLSINSVES | |
| | | EDIADYYCQQNNNWPTTFGAGTKLELK | |
| CD3 | AB002VH | QVQLQQSGAELARPGASVKMSCKASGYTFTRYTMHWVKQR | 116 |
| (AB002) | | PGQGLEWIGYINPSRGYTNYNQKFKDKATLTTDKSSSTAY | |
| | | MQLSSLTSEDSAVYYCARYYDDHYCLDYWGQGTTLTVSS | |
| | AB002VK | QIVLTQSPAIMSASPGEKVTMTCRASSSVSYMNWYQQKSG | 117 |
| | | TSPKRWIYDTSKVASGVPYRFSGSGSGTSYSLTISSMEAE | |
| | | DAATYYCQQWSSNPLTFGSGTKLEIN | |
| EGFR | Cetuximab. | QVQLKQSGPGLVQPSQSLSITCTVSGFSLTNYGVHWVRQS | 118 |
| (Cetuximan. | 2VH | PGKGLEWLGVIWSGGNTDYNTPFTSRLSINKDNSKSQVFF | |
| 2) | | KMNSLQSEDTAIYYCARALTYYDYEFAYWGQGTLVTVSA | |
| | Cetuximab. | DILLTQSPVILSVSPGERVSFSCRASQSIGTNIHWYQQRT | 119 |
| | 2VK | SGSPRLLIKYASESISGIPSRFSGSGSGTDFTLSINSVES | |
| | | EDIADYYCQQNNNWPTTFGAGTKLELK | |
| CD3 | AB002.2VH | QVQLQQSGAELARPGASVKMSCKASGYTFTRYTMHWVKQR | 120 |
| (AB002.2) | | PGQGLEWIGYINPSRGYTNYNQKFKDKATLTTDKSSSTAY | |
| | | MQLSSLTSEDSAVYYCARYYDDHYSLDYWGQGTTLTVSS | |
| | AB002.2VK | QIVLTQSPAIMSASPGEKVTMTCRASSSVSYMNWYQQKSG | 121 |
| | | TSPKRWIYDTSKVASGVPYRFSGSGSGTSYSLTISSMEAE | |
| | | DAATYYCQQWSSNPLTFGSGTKLEIK | |
| CD2 | AB765VH | EVQLVESGGGLVQPGGSLRLSCAASGFAFSSYDMSWVRQA | 122 |
| (AB765) | | PGKGLEWVSYISGGGFTYYPDTVKGRFTISRDNSKNTLYL | |
| | | QMNSLRAEDTAVYYCARQGANWELVYWGQGTLVTVSS | |
| | AB765VK | EIVLTQSPATLSLSPGERATLSCRASQSISDFLHWYQQKP | 123 |
| | | GQAPRLLIKYASQSISGIPARFSGSGSGTDFTLTISSLEP | |
| | | EDFAVYYCQNGHNFPPTFGGGTKVEIK | |
| PD1(AB426) | AB426VH | QVQLVESGGGVVQPGRSLRLDCKASGITFSNSGMHWVRQA | 124 |
| | | PGKGLEWVAVIWYDGSKRYYADSVKGRFTISRDNSKNTLF | |
| | | LQMNSLRAEDTAVYYCATNDDYWGQGTLVTVSS | |
| | AB426VK | EIVLTQSPATLSLSPGERATLSCRASQSVSSYLAWYQQKP | 125 |
| | | GQAPRLLIYDASNRATGIPARFSGSGSGTDFTLTISSLEP | |
| | | EDFAVYYCQQSSNWPRTFGQGTKVEIK | |
| PDL1(YW243) | YW243VH | EVQLVESGGGLVQPGGSLRLSCAASGFTFSDSWIHWVRQA | 126 |
| | | PGKGLEWVAWISPYGGSTYYADSVKGRFTISADTSKNTAY | |
| | | LQMNSLRAEDTAVYYCARRHYPGGFDYWGQGTLVTVSA | |
| | YW243VK | DIQMTQSPSSLSASVGDRVTITCRASQDVSTAVAWYQQKP | 127 |
| | | GKAPKLLIYSASFLYSGVPSRFSGSGSGTDFTLTISSLQP | |
| | | EDFATYYCQQYLYHPATFGQGTKVEIK | |

[0176] Five sets of five trispecific molecules were generated based on chain combinations 1-5 listed in Table 14. In the first set of five trispecific molecules TMH1-5, VH1 and VL1 are from an anti-CD2 antibody AB765 (AB765 VH and AB765 VK), VH2 and VL2 are from the anti-EGFR antibody Cetuximab (Cetuximab VH and Cetuximab VK), and VH3 and VL3 are from an anti-CD3 antibody AB002 (AB002 VH and AB002 VK). The anti-CD2 antibody AB765 VH domain and the selected MH2 domain were integrated into a pHybE huIgG1 vector with knobs mutation in the CH3 domain to form knob heavy chain. The anti-CD2 antibody AB765 Vκ domain and the paired MH2 domain were assembled and then introduced to a pHybE huCκ vector to form the corresponding light chain. The anti-EGFR/CD3 Cetuximab VH-linker-AB002 VH and the Cetuximab AB002 Vκ were incorporated into a pHybE huIgG1 vector with holes mutations in the CH3 domain and a pHybE huCκ vector, respectively. Several constructs lacking MH2 or EH2 modifications were also tested for comparison purposes, including: (1) a knobs-into-holes binding protein (PLY11) targeting CD2, CD3, and EGFR with the same variable domains; (2) an anti-CD2 halfbody (TS2/18 half); and (3) an anti-EGFR/CD3 halfbody (DVD860 half).

[0177] In the second set of five trispecific molecules TMH6-10, VH1 and VL1 are from anti-PD1 AB426 (AB426 VH and AB426 Vκ), VH2 and VL2 are from the non-glycosylated anti-EGFR antibody Cetuximab.2 (Cetuximab.2 VH and Cetuximab.2 Vκ), and VH3 and VL3 are from the non-glycosylated and non-free Cysteine anti-CD3 antibody AB002.2 (AB002.2 VH and AB002.Vκ). Cetuximab.2 is a mutant of Cetuximab with the glycosylation sites on variable domain removed. AB002.2 is a mutant of AB002 with free Cysteine on the heavy chain CDR3 and the glycosylation site on the light chain removed. The anti-PD1 antibody AB426 VH domain and the selected MH2 domain were integrated into a pHybE huIgG1 vector with knobs mutation in the CH3 domain and LALA mutation in the CH2 domains to reduce Fcγ Receptor binding. The anti-PD1 antibody AB426 Vκ domain and the paired MH2 domain were assembled and then introduced to a pHybE huCκ vector to form the corresponding light chain. The Cetuximab.2 VH-linker-AB002.2 VH was incorporated into a pHybE huIgG1 vector with holes mutations in the CH3 domain and LALA mutations in the CH2 to form a hole heavy chain. The Cetuximab.2 anti-AB002.2 Vκ was incorporated into and a pHybE huCκ vector to form the light chain pairing to the hole heavy chain. Several constructs lacking MH2 or EH2 modifications were also tested for comparison purposes, including: (1) a knobs-into-holes binding protein KIH4 targeting PD1, CD3 and EGFR with the same variable domains used in TMH6-10; (2) an anti-PD1 halfbody (AB426 half); and (3) an anti-EGFR/CD3 halfbody (DVD860.2 half) with variable domains from Cetuximab.2 and AB002.2.

[0178] In the third set of five trispecific molecules TMH11-15, VH1 and VL1 are from anti-PDL1 antibody YW243 (YW243 VH and YW243 Vκ), VH2 and VL2 are from the non-glycosylated anti-EGFR antibody Cetuximab.2 (Cetuximab.2 VH and Cetuximab.2 Vκ), and VH3 and VL3 are from the non-glycosylated and non-free Cysteine anti-CD3 antibody AB002.2 (AB002.2 VH and AB002.2 Vκ). Cetuximab.2 is a mutant of Cetuximab with the glycosylation sites on the variable domains removed. AB002.2 is a mutant of AB002 with free Cysteine on the heavy chain CDR3 and the glycosylation site on the light chain removed. The anti-PDL1 antibody YW243 VH domain and selected MH2 domain were integrated into a pHybE huIgG1 vector with LALA mutation in the CH2 domain and knobs mutation in the CH3 domain to form knob heavy chain. The YW243 Vκ domain and the paired MH2 domain were assembled and then introduced to a pHybE huCκ vector to form the corresponding light chain The Cetuximab.2 VH-linker-AB002.2 VH was incorporated into a pHybE huIgG1 vector with LALA mutations in the CH2 domain and holes mutations in the CH3 domain to form a hole heavy chain. The Cetuximab.2 Vκ-linker-AB002.2 Vκ was incorporated into pHybE huCκ vector to form the light chain pairing to the hole heavy chain Several constructs lacking MH2 or EH2 modifications were also tested for comparison purposes, including: (1) a knobs-into-holes binding protein KIH5 targeting PDL1, CD3 and EGFR with the same variable domains used in TMH11-15; (2) an anti-PDL1 halfbody (YW243half); and (3) an anti-EGFR/CD3 halfbody (DVD860.2 half) with variable domains from Cetuximab.2 and AB002.2.

[0179] In the fourth set of five trispecific molecules TMH16-20, VH1 and VL1 are from anti-PDL1 antibody YW243(YW243 VH and YW243 VK), VH2 and VL2 are from the anti-EGFR antibody Cetuximab (Cetuximab VH and Cetuximab VK), and VH3 and VL3 are from anti-CD3 antibody AB002 (AB002 VH and AB002Vκ). The anti-PDL1 antibody YW243 VH domain and selected MH2 domain were integrated into a pHybE huIgG1 vector with LALA mutation in the CH2 domain and knobs mutation in the CH3 domain to form a knobs heavy chain. The YW243 Vκ domain and the paired MH2 domain were assembled and then introduced to a pHybE huCκ vector to form the corresponding light chain. The Cetuximab VH-linker-AB002 VH was incorporated into a pHybE huIgG1 vector with LALA mutations in the CH2 domain and holes mutations in the CH3 domain to form a hole heavy chain. The Cetuximab Vκ-linker-AB002 Vκ and a pHybE huCκ vector were used, respectively. Several constructs lacking MH2 or EH2 modifications were also tested for comparison purposes, including: (1) a knobs-into-holes binding protein KIH6 targeting PDL1, CD3 and EGFR with the same variable domains used in TMH16-20; (2) an anti-PDL1 halfbody (YW243 half); and (3) an anti-EGFR/CD3 halfbody (DVD860 half) with variable domains from Cetuximab and AB002.

[0180] In the fifth set of five trispecific molecules TMH21-25, VH1 and VL1 are from anti-PD1 antibody AB426 (AB426 VH and AB426 VK), VH2 and VL2 are from the anti-EGFR antibody Cetuximab (Cetuximab VH and Cetuximab VK), and VH3 and VL3 are from anti-CD3 antibody AB002 (AB002 VH and AB002Vκ). The anti-PD1 antibody AB426 VH domain and selected MH2 domain were integrated into a pHybE huIgG1 vector with LALA mutation in the CH2 domain and knobs mutation in the CH3 domain. The AB426 VK domain and the paired MH2 domain were assembled and then introduced into a pHybE huCκ vector to form the corresponding light chain. The Cetuximab VH-linker-AB002 VH was incorporated into a pHybE huIgG1 vector with LALA mutations in the CH2 domain and holes mutations in the CH3 domain to form a hole heavy chain. The Cetuximab Vκ-linker-AB002 Vκ and a pHybE huCκ vector were used, respectively. Several constructs lacking MH2 or EH2 modifications were also tested for comparison purposes, including: (1) a knobs-into-holes binding protein KIH7 targeting PD1, CD3 and EGFR with the same variable domains used in TMH21-25; (2) an anti-PD1 halfbody (AB426 half); and (3) an anti-EGFR/CD3 halfbody (DVD860 half) with variable domains from Cetuximab and AB002.

[0181] Table 16 summarizes the sequences of the four chains in each of the trispecific molecules and halfbodies that were generated and tested. Table 16 also shows the sequences of DVD889 [hu IgG1/k] that was used as a negative control. DVD889 [hu IgG1/k] binds to Tetanus toxoid.

TABLE 16
Sequences Of Generated Trispecific Molecules, Halfbodies, and Control DVD-Ig

| Prispecific | | Sequence | |
|---|---|---|---|
| Molecules | Chain | 12345678901234567890123456789012345678901234567890 | SEQ ID NO: |
| TMH1 | AB765 VH-linker- | EVQLVESGGGLVQPGGSLRLSCAASGFAFSSYDMSWVRQAPGKGLEWVSY | 128 |
| | MH2-hinge-CH2- | ISGGGFTYYPDTVKGRFTISRDNSKNTLYLQMNSLRAEDTAVYYCARQGA | |
| | CH3(knobs) | NWELVYWGQGTLVTVSSASTELPPKVSVFVPPRDGFFGNPRKSKLICQAT | |
| | | GFSPRQIQVSWLREGKQVGSGVTTDQVQAEAKESGPTTYKVTSTLTIKES | |
| | | DWLGQSMFTCRVDHRGLTFQQNASSMCDKTHTCPPCPAPELLGGPSVFLF | |
| | | PPKPKDTLMISRTPEVTCVVVDVSHEDPEVKFNWYVDGVEVHNAKTKPRE | |
| | | EQYNSTYRVVSVLTVLHQDWLNGKEYKCKVSNKALPAPIEKTISKAKGQP | |
| | | REPQVYTLPPSREEMTKNQVSLWCLVKGFYPSDIAVEWESNGQPENNYKT | |
| | | TPPVLDSDGSFFLYSKLTVDKSRWQQGNVFSCSVMHEALHNHYTQKSLSL | |
| | | SPGK | |
| | AB765 VK-linker- | EIVLTQSPATLSLSPGERATLSCRASQSISDFLHWYQQKPGQAPRLLIKY | 129 |
| | MH2 | ASQSISGIPARFSGSGSGTDFTLTISSLEPEDFAVYYCQNGHNFPPTFGG | |
| | | GTKVEIKRTAELPPKVSVFVPPRDGFFGNPRKSKLICQATGFSPRQIQVS | |
| | | WLREGKQVGSGVTTDQVQAEAKESGPTTYKVTSTLTIKESDWLGQSMFTC | |
| | | RVDHRGLTFQQNASSMC | |
| | Cetuximab VH- | QVQLKQSGPGLVQPSQSLSITCTVSGFSLTNYGVHWVRQSPGKGLEWLGV | 130 |
| | linker-AB002 VH- | IWSGGNTDYNTPFTSRLSINKDNSKSQVFFKMNSLQSNDTAIYYCARALT | |
| | CH1-hinge-CH2- | YYDYEFAYWGQGTLVTVSAASTKGPSVFPLAPQVQLQQSGAELARPGASV | |
| | CH3(holes) | KMSCKASGYTFTRYTMHWVKQRPGQGLEWIGYINPSRGYTNYNQKFKDKA | |
| | | TLTTDKSSSTAYMQLSSLTSEDSAVYYCARYYDDHYCLDYWGQGTTLTVS | |
| | | SASTKGPSVFPLAPSSKSTSGGTAALGCLVKDYFPEPVTVSWNSGALTSG | |
| | | VHTFPAVLQSSGLYSLSSVVTVPSSSLGTQTYICNVNHKPSNTKVDKKVE | |
| | | PKSCDKTHTCPPCPAPELLGGPSVFLFPPKPKDTLMISRTPEVTCVVVDV | |
| | | SHEDPEVKFNWYVDGVEVHNAKTKPREEQYNSTYRVVSVLTVLHQDWLNG | |
| | | KEYKCKVSNKALPAPIEKTISKAKGQPREPQVYTLPPSREEMTKNQVSLS | |
| | | CAVKGFYPSDIAVEWESNGQPENNYKTTPPVLDSDGSFFLVSKLTVDKSR | |
| | | WQQGNVFSCSVMHEALHNHYTQKSLSLSPGK | |
| | Cetuximab VK- | DILLTQSPVILSVSPGERVSFSCRASQSIGTNIHWYQQRTNGSPRLLIKY | 131 |
| | linker-AB002 Vκ- | ASESISGIPSRFSGSGSGTDFTLSINSVESEDIADYYCQQNNNWPTTFGA | |
| | Cκ | GTKLELKRTVAAPSVFIFPPQIVLTQSPAIMSASPGEKVTMTCRASSSVS | |
| | | YMNWYQQKSGTSPKRWIYDTSKVASGVPYRFSGSGSGTSYSLTISSMEAE | |
| | | DAATYYCQQWSSNPLTFGSGTKLEINRTVAAPSVFIFPPSDEQLKSGTAS | |
| | | VVCLLNNFYPREAKVQWKVDNALQSGNSQESVTEQDSKDSTYSLSSTLTL | |
| | | SKADYEKHKVYACEVTHQGLSSPVTKSFNRGEC | |
| TMH2 | AB765 VH-linker- | EVQLVESGGGLVQPGGSLRLSCAASGFAFSSYDMSWVRQAPGKGLEWVSY | 132 |
| | MH2p-hinge-CH2- | ISGGGFTYYPDTVKGRFTISRDNSKNTLYLQMNSLRAEDTAVYYCARQGA | |
| | CH3(knobs) | NWELVYWGQGTLVTVSSASTELPPKVSVFVPPRDGFFGNPRKSKLICKAT | |
| | | GFSPRQIQVSWLREGKQVGSGVTTKQVQAEAKESGPTTYKVTSTLTIKES | |
| | | DWLGQSMFTCRVDHRGLTFQQNASSMCDKTHTCPPCPAPELLGGPSVFLF | |
| | | PPKPKDTLMISRTPEVTCVVVDVSHEDPEVKFNWYVDGVEVHNAKTKPRE | |
| | | EQYNSTYRVVSVLTVLHQDWLNGKEYKCKVSNKALPAPIEKTISKAKGQP | |
| | | REPQVYTLPPSREEMTKNQVSLWCLVKGFYPSDIAVEWESNGQPENNYKT | |
| | | TPPVLDSDGSFFLYSKLTVDKSRWQQGNVFSCSVMHEALHNHYTQKSLSL | |
| | | SPGK | |
| | AB765 VK-linker- | EIVLTQSPATLSLSPGERATLSCRASQSISDFLHWYQQKPGQAPRLLIKY | 133 |
| | MH2n | ASQSISGIPARFSGSGSGTDFTLTISSLEPEDFAVYYCQNGHNFPPTFGG | |
| | | GTKVEIKRTAELPPKVSVFVPPRDGFFGNPRKSELICEATGFSPRQIQVS | |
| | | WLREGKQVGSGVTTDQVQAEAKESGPTTYDVTSTLTIKESDWLGQSMFTC | |
| | | RVDHRGLTFQQNASSMC | |
| | Cetuximab VH- | QVQLKQSGPGLVQPSQSLSITCTVSGFSLTNYGVHWVRQSPGKGLEWLGV | 134 |
| | linker-AB002 VH- | IWSGGNTDYNTPFTSRLSINKDNSKSQVFFKMNSLQSNDTAIYYCARALT | |
| | CH1-hinge-CH2- | YYDYEFAYWGQGTLVTVSAASTKGPSVFPLAPQVQLQQSGAELARPGASV | |
| | CH3(holes) | KMSCKASGYTFTRYTMHWVKQRPGQGLEWIGYINPSRGYTNYNQKFKDKA | |
| | | TLTTDKSSSTAYMQLSSLTSEDSAVYYCARYYDDHYCLDYWGQGTTLTVS | |
| | | SASTKGPSVFPLAPSSKSTSGGTAALGCLVKDYFPEPVTVSWNSGALTSG | |
| | | VHTFPAVLQSSGLYSLSSVVTVPSSSLGTQTYICNVNHKPSNTKVDKKVE | |
| | | PKSCDKTHTCPPCPAPELLGGPSVFLFPPKPKDTLMISRTPEVTCVVVDV | |
| | | SHEDPEVKFNWYVDGVEVHNAKTKPREEQYNSTYRVVSVLTVLHQDWLNG | |
| | | KEYKCKVSNKALPAPIEKTISKAKGQPREPQVYTLPPSREEMTKNQVSLS | |
| | | CAVKGFYPSDIAVEWESNGQPENNYKTTPPVLDSDGSFFLVSKLTVDKSR | |
| | | WQQGNVFSCSVMHEALHNHYTQKSLSLSPGK | |
| | Cetuximab VK- | DILLTQSPVILSVSPGERVSFSCRASQSIGTNIHWYQQRTNGSPRLLIKY | 135 |
| | linker-AB002 VK- | ASESISGIPSRFSGSGSGTDFTLSINSVESEDIADYYCQQNNNWPTTFGA | |
| | Cκ | GTKLELKRTVAAPSVFIFPPQIVLTQSPAIMSASPGEKVTMTCRASSSVS | |
| | | YMNWYQQKSGTSPKRWIYDTSKVASGVPYRFSGSGSGTSYSLTISSMEAE | |
| | | DAATYYCQQWSSNPLTFGSGTKLEINRTVAAPSVFIFPPSDEQLKSGTAS | |
| | | VVCLLNNFYPREAKVQWKVDNALQSGNSQESVTEQDSKDSTYSLSSTLTL | |
| | | SKADYEKHKVYACEVTHQGLSSPVTKSFNRGEC | |
| TMH3 | AB765 VH-linker- | EVQLVESGGGLVQPGGSLRLSCAASGFAFSSYDMSWVRQAPGKGLEWVSY | 136 |
| | MH2n-hinge-CH2- | ISGGGFTYYPDTVKGRFTISRDNSKNTLYLQMNSLRAEDTAVYYCARQGA | |
| | CH3(knobs) | NWELVYWGQGTLVTVSSASTELPPKVSVFVPPRDGFFGNPRKSELICEAT | |
| | | GFSPRQIQVSWLREGKQVGSGVTTDQVQAEAKESGPTTYDVTSTLTIKES | |
| | | DWLGQSMFTCRVDHRGLTFQQNASSMCDKTHTCPPCPAPELLGGPSVFLF | |
| | | PPKPKDTLMISRTPEVTCVVVDVSHEDPEVKFNWYVDGVEVHNAKTKPRE | |
| | | EQYNSTYRVVSVLTVLHQDWLNGKEYKCKVSNKALPAPIEKTISKAKGQP | |
| | | REPQVYTLPPSREEMTKNQVSLWCLVKGFYPSDIAVEWESNGQPENNYKT | |
| | | TPPVLDSDGSFFLYSKLTVDKSRWQQGNVFSCSVMHEALHNHYTQKSLSL | |
| | | SPGK | |
| | AB765 VK-linker- | EIVLTQSPATLSLSPGERATLSCRASQSISDFLHWYQQKPGQAPRLLIKY | 137 |
| | MH2p | ASQSISGIPARFSGSGSGTDFTLTISSLEPEDFAVYYCQNGHNFPPTFGG | |
| | | GTKVEIKRTAELPPKVSVFVPPRDGFFGNPRKSKLICKATGFSPRQIQVS | |
| | | WLREGKQVGSGVTTKQVQAEAKESGPTTYKVTSTLTIKESDWLGQSMFTC | |
| | | RVDHRGLTFQQNASSMC | |
| | Cetuximab VH- | QVQLKQSGPGLVQPSQSLSITCTVSGFSLTNYGVHWVRQSPGKGLEWLGV | 138 |
| | linker-AB002 VH- | IWSGGNTDYNTPFTSRLSINKDNSKSQVFFKMNSLQSNDTAIYYCARALT | |
| | CH1-hinge-CH2- | YYDYEFAYWGQGTLVTVSAASTKGPSVFPLAPQVQLQQSGAELARPGASV | |
| | CH3(holes) | KMSCKASGYTFTRYTMHWVKQRPGQGLEWIGYINPSRGYTNYNQKFKDKA | |
| | | TLTTDKSSSTAYMQLSSLTSEDSAVYYCARYYDDHYCLDYWGQGTTLTVS | |
| | | SASTKGPSVFPLAPSSKSTSGGTAALGCLVKDYFPEPVTVSWNSGALTSG | |
| | | VHTFPAVLQSSGLYSLSSVVTVPSSSLGTQTYICNVNHKPSNTKVDKKVE | |
| | | PKSCDKTHTCPPCPAPELLGGPSVFLFPPKPKDTLMISRTPEVTCVVVDV | |
| | | SHEDPEVKFNWYVDGVEVHNAKTKPREEQYNSTYRVVSVLTVLHQDWLNG | |
| | | KEYKCKVSNKALPAPIEKTISKAKGQPREPQVYTLPPSREEMTKNQVSLS | |
| | | CAVKGFYPSDIAVEWESNGQPENNYKTTPPVLDSDGSFFLVSKLTVDKSR | |
| | | WQQGNVFSCSVMHEALHNHYTQKSLSLSPGK | |
| | Cetuximab VK- | DILLTQSPVILSVSPGERVSFSCRASQSIGTNIHWYQQRTNGSPRLLIKY | 139 |
| | linker-AB002 VK- | ASESISGIPSRFSGSGSGTDFTLSINSVESEDIADYYCQQNNNWPTTFGA | |
| | Cκ | GTKLELKRTVAAPSVFIFPPQIVLTQSPAIMSASPGEKVTMTCRASSSVS | |
| | | YMNWYQQKSGTSPKRWIYDTSKVASGVPYRFSGSGSGTSYSLTISSMEAE | |
| | | DAATYYCQQWSSNPLTFGSGTKLEINRTVAAPSVFIFPPSDEQLKSGTAS | |
| | | VVCLLNNFYPREAKVQWKVDNALQSGNSQESVTEQDSKDSTYSLSSTLTL | |
| | | SKADYEKHKVYACEVTHQGLSSPVTKSFNRGEC | |
| TMH4 | AB765 VH-linker- | EVQLVESGGGLVQPGGSLRLSCAASGFAFSSYDMSWVRQAPGKGLEWVSY | 140 |
| | MH2h-hinge-CH2- | ISGGGFTYYPDTVKGRFTISRDNSKNTLYLQMNSLRAEDTAVYYCARQGA | |
| | CH3(knobs) | NWELVYWGQGTLVTVSSASTELPPKVSVFVPPRDGFFGNPRKSKLACSAT | |
| | | GFSPRQIQVSWLREGKQVGSGVTTDQVQAEAKESGPTTYKVASTLTIKES | |
| | | DWLGQSMFTCRVDHRGLTFQQNASSMCDKTHTCPPCPAPELLGGPSVFLF | |
| | | PPKPKDTLMISRTPEVTCVVVDVSHEDPEVKFNWYVDGVEVHNAKTKPRE | |
| | | EQYNSTYRVVSVLTVLHQDWLNGKEYKCKVSNKALPAPIEKTISKAKGQP | |
| | | REPQVYTLPPSREEMTKNQVSLWCLVKGFYPSDIAVEWESNGQPENNYKT | |
| | | TPPVLDSDGSFFLYSKLTVDKSRWQQGNVFSCSVMHEALHNHYTQKSLSL | |
| | | SPGK | |
| | AB765 VK-linker- | EIVLTQSPATLSLSPGERATLSCRASQSISDFLHWYQQKPGQAPRLLIKY | 141 |
| | MH2k | ASQSISGIPARFSGSGSGTDFTLTISSLEPEDFAVYYCQNGHNFPPTFGG | |
| | | GTKVEIKRTAELPPKVSVFVPPRDGFFGNPRKSKLWCQATGFSPRQIQVS | |
| | | WLREGKQVGSGVTTDQVQAEAKESGPTTYKVTSTLTIKESDWLGQSMFTC | |
| | | RVDHRGLTFQQNASSMC | |
| | Cetuximab VH- | QVQLKQSGPGLVQPSQSLSITCTVSGFSLTNYGVHWVRQSPGKGLEWLGV | 142 |
| | linker-AB002 VH- | IWSGGNTDYNTPFTSRLSINKDNSKSQVFFKMNSLQSNDTAIYYCARALT | |
| | CH1-hinge-CH2- | YYDYEFAYWGQGTLVTVSAASTKGPSVFPLAPQVQLQQSGAELARPGASV | |
| | CH3(holes) | KMSCKASGYTFTRYTMHWVKQRPGQGLEWIGYINPSRGYTNYNQKFKDKA | |
| | | TLTTDKSSSTAYMQLSSLTSEDSAVYYCARYYDDHYCLDYWGQGTTLTVS | |
| | | SASTKGPSVFPLAPSSKSTSGGTAALGCLVKDYFPEPVTVSWNSGALTSG | |
| | | VHTFPAVLQSSGLYSLSSVVTVPSSSLGTQTYICNVNHKPSNTKVDKKVE | |
| | | PKSCDKTHTCPPCPAPELLGGPSVFLFPPKPKDTLMISRTPEVTCVVVDV | |
| | | SHEDPEVKFNWYVDGVEVHNAKTKPREEQYNSTYRVVSVLTVLHQDWLNG | |
| | | KEYKCKVSNKALPAPIEKTISKAKGQPREPQVYTLPPSREEMTKNQVSLS | |
| | | CAVKGFYPSDIAVEWESNGQPENNYKTTPPVLDSDGSFFLVSKLTVDKSR | |
| | | WQQGNVFSCSVMHEALHNHYTQKSLSLSPGK | |
| | Cetuximab VK- | DILLTQSPVILSVSPGERVSFSCRASQSIGTNIHWYQQRTNGSPRLLIKY | 143 |
| | linker-AB002 VK- | ASESISGIPSRFSGSGSGTDFTLSINSVESEDIADYYCQQNNNWPTTFGA | |
| | Cκ | GTKLELKRTVAAPSVFIFPPQIVLTQSPAIMSASPGEKVTMTCRASSSVS | |
| | | YMNWYQQKSGTSPKRWIYDTSKVASGVPYRFSGSGSGTSYSLTISSMEAE | |
| | | DAATYYCQQWSSNPLTFGSGTKLEINRTVAAPSVFIFPPSDEQLKSGTAS | |
| | | VVCLLNNFYPREAKVQWKVDNALQSGNSQESVTEQDSKDSTYSLSSTLTL | |
| | | SKADYEKHKVYACEVTHQGLSSPVTKSFNRGEC | |
| TMH5 | AB765 VH-linker- | EVQLVESGGGLVQPGGSLRLSCAASGFAFSSYDMSWVRQAPGKGLEWVSY | 144 |
| | MH2k-hinge-CH2- | ISGGGFTYYPDTVKGRFTISRDNSKNTLYLQMNSLRAEDTAVYYCARQGA | |
| | CH3(knobs) | NWELVYWGQGTLVTVSSASTELPPKVSVFVPPRDGFFGNPRKSKLWCQAT | |
| | | GFSPRQIQVSWLREGKQVGSGVTTDQVQAEAKESGPTTYKVTSTLTIKES | |
| | | DWLGQSMFTCRVDHRGLTFQQNASSMCDKTHTCPPCPAPELLGGPSVFLF | |
| | | PPKPKDTLMISRTPEVTCVVVDVSHEDPEVKFNWYVDGVEVHNAKTKPRE | |
| | | EQYNSTYRVVSVLTVLHQDWLNGKEYKCKVSNKALPAPIEKTISKAKGQP | |
| | | REPQVYTLPPSREEMTKNQVSLWCLVKGFYPSDIAVEWESNGQPENNYKT | |
| | | TPPVLDSDGSFFLYSKLTVDKSRWQQGNVFSCSVMHEALHNHYTQKSLSL | |
| | | SPGK | |
| | AB765 VK-linker- | EIVLTQSPATLSLSPGERATLSCRASQSISDFLHWYQQKPGQAPRLLIKY | 145 |
| | MH2h | ASQSISGIPARFSGSGSGTDFTLTISSLEPEDFAVYYCQNGHNFPPTFGG | |
| | | GTKVEIKRTAELPPKVSVFVPPRDGFFGNPRKSKLACSATGFSPRQIQVS | |
| | | WLREGKQVGSGVTTDQVQAEAKESGPTTYKVASTLTIKESDWLGQSMFTC | |
| | | RVDHRGLTFQQNASSMC | |
| | Cetuximab VH- | QVQLKQSGPGLVQPSQSLSITCTVSGFSLTNYGVHWVRQSPGKGLEWLGV | 146 |
| | linker-AB002 VH- | IWSGGNTDYNTPFTSRLSINKDNSKSQVFFKMNSLQSNDTAIYYCARALT | |
| | CH1-hinge-CH2- | YYDYEFAYWGQGTLVTVSAASTKGPSVFPLAPQVQLQQSGAELARPGASV | |
| | CH3(holes) | KMSCKASGYTFTRYTMHWVKQRPGQGLEWIGYINPSRGYTNYNQKFKDKA | |
| | | TLTTDKSSSTAYMQLSSLTSEDSAVYYCARYYDDHYCLDYWGQGTTLTVS | |
| | | SASTKGPSVFPLAPSSKSTSGGTAALGCLVKDYFPEPVTVSWNSGALTSG | |
| | | VHTFPAVLQSSGLYSLSSVVTVPSSSLGTQTYICNVNHKPSNTKVDKKVE | |
| | | PKSCDKTHTCPPCPAPELLGGPSVFLFPPKPKDTLMISRTPEVTCVVVDV | |
| | | SHEDPEVKFNWYVDGVEVHNAKTKPREEQYNSTYRVVSVLTVLHQDWLNG | |
| | | KEYKCKVSNKALPAPIEKTISKAKGQPREPQVYTLPPSREEMTKNQVSLS | |
| | | CAVKGFYPSDIAVEWESNGQPENNYKTTPPVLDSDGSFFLVSKLTVDKSR | |
| | | WQQGNVFSCSVMHEALHNHYTQKSLSLSPGK | |
| | Cetuximab VK- | DILLTQSPVILSVSPGERVSFSCRASQSIGTNIHWYQQRTNGSPRLLIKY | 147 |
| | linker-AB002 VK- | ASESISGIPSRFSGSGSGTDFTLSINSVESEDIADYYCQQNNNWPTTFGA | |
| | Cκ | GTKLELKRTVAAPSVFIFPPQIVLTQSPAIMSASPGEKVTMTCRASSSVS | |
| | | YMNWYQQKSGTSPKRWIYDTSKVASGVPYRFSGSGSGTSYSLTISSMEAE | |
| | | DAATYYCQQWSSNPLTFGSGTKLEINRTVAAPSVFIFPPSDEQLKSGTAS | |
| | | VVCLLNNFYPREAKVQWKVDNALQSGNSQESVTEQDSKDSTYSLSSTLTL | |
| | | SKADYEKHKVYACEVTHQGLSSPVTKSFNRGEC | |
| PLY11 | TS2/18 VH-CH1- | EVQLVESGGGLVMPGGSLKLSCAASGFAFSSYDMSWVRQTPEKRLEWVAY | 148 |
| | hinge-CH2- | ISGGGFTYYPDTVKGRFTLSRDNAKNTLYLQMSSLKSEDTAMYYCARQGA | |
| | CH3(knobs) | NWELVYWGQGTLVTVSAASTKGPSVFPLAPSSKSTSGGTAALGCLVKDYF | |
| | | PEPVTVSWNSGALTSGVHTFPAVLQSSGLYSLSSVVTVPSSSLGTQTYIC | |
| | | NVNHKPSNTKVDKKVEPKSCDKTHTCPPCPAPELLGGPSVFLFPPKPKDT | |
| | | LMISRTPEVTCVVVDVSHEDPEVKFNWYVDGVEVHNAKTKPREEQYNSTY | |
| | | RVVSVLTVLHQDWLNGKEYKCKVSNKALPAPIEKTISKAKGQPREPQVYT | |
| | | LPPSREEMTKNQVSLWCLVKGFYPSDIAVEWESNGQPENNYKTTPPVLDS | |
| | | DGSFFLYSKLTVDKSRWQQGNVFSCSVMHEALHNHYTQKSLSLSPGK | |
| | TS2/18 VK-CK | DIVMTQSPATLSVTPGDRVFLSCRASQSISDFLHWYQQKSHESPRLLIKY | 149 |
| | | ASQSISGIPSRFSGSGSGSDFTLSINSVEPEDVGVYFCQNGHNFPPTFGG | |
| | | GTKLEIKRTVAAPSVFIFPPSDEQLKSGTASVVCLLNNFYPREAKVQWKV | |
| | | DNALQSGNSQESVTEQDSKDSTYSLSSTLTLSKADYEKHKVYACEVTHQG | |
| | | LSSPVTKSFNRGEC | |
| | Cetuximab VH- | QVQLKQSGPGLVQPSQSLSITCTVSGFSLTNYGVHWVRQSPGKGLEWLGV | 150 |
| | linker-AB002 VH- | IWSGGNTDYNTPFTSRLSINKDNSKSQVFFKMNSLQSNDTAIYYCARALT | |
| | CH1-hinge-CH2- | YYDYEFAYWGQGTLVTVSAASTKGPSVFPLAPQVQLQQSGAELARPGASV | |
| | CH3(holes) | KMSCKASGYTFTRYTMHWVKQRPGQGLEWIGYINPSRGYTNYNQKFKDKA | |
| | | TLTTDKSSSTAYMQLSSLTSEDSAVYYCARYYDDHYCLDYWGQGTTLTVS | |
| | | SASTKGPSVFPLAPSSKSTSGGTAALGCLVKDYFPEPVTVSWNSGALTSG | |
| | | VHTFPAVLQSSGLYSLSSVVTVPSSSLGTQTYICNVNHKPSNTKVDKKVE | |
| | | PKSCDKTHTCPPCPAPELLGGPSVFLFPPKPKDTLMISRTPEVTCVVVDV | |
| | | SHEDPEVKFNWYVDGVEVHNAKTKPREEQYNSTYRVVSVLTVLHQDWLNG | |
| | | KEYKCKVSNKALPAPIEKTISKAKGQPREPQVYTLPPSREEMTKNQVSLS | |
| | | CAVKGFYPSDIAVEWESNGQPENNYKTTPPVLDSDGSFFLVSKLTVDKSR | |
| | | WQQGNVFSCSVMHEALHNHYTQKSLSLSPGK | |
| | Cetuximab VK- | DILLTQSPVILSVSPGERVSFSCRASQSIGTNIHWYQQRTNGSPRLLIKY | 151 |
| | linker-AB002 VK- | ASESISGIPSRFSGSGSGTDFTLSINSVESEDIADYYCQQNNNWPTTFGA | |
| | Cκ | GTKLELKRTVAAPSVFIFPPQIVLTQSPAIMSASPGEKVTMTCRASSSVS | |
| | | YMNWYQQKSGTSPKRWIYDTSKVASGVPYRFSGSGSGTSYSLTISSMEAE | |
| | | DAATYYCQQWSSNPLTFGSGTKLEINRTVAAPSVFIFPPSDEQLKSGTAS | |
| | | VVCLLNNFYPREAKVQWKVDNALQSGNSQESVTEQDSKDSTYSLSSTLTL | |
| | | SKADYEKHKVYACEVTHQGLSSPVTKSFNRGEC | |
| TS2/18 halfbody | TS2/18 VH-CH1- | EVQLVESGGGLVMPGGSLKLSCAASGFAFSSYDMSWVRQTPEKRLEWVAY | 152 |
| | hinge-CH2-CH3 | ISGGGFTYYPDTVKGRFTLSRDNAKNTLYLQMSSLKSEDTAMYYCARQGA | |
| | (halfbody) | NWELVYWGQGTLVTVSAASTKGPSVFPLAPSSKSTSGGTAALGCLVKDYF | |
| | | PEPVTVSWNSGALTSGVHTFPAVLQSSGLYSLSSVVTVPSSSLGTQTYIC | |
| | | NVNHKPSNTKVDKKVEPKSCDKTHTSPPSPAPELLGGPSVFLFPPKPKDT | |
| | | LMISRTPEVTCVVVDVSHEDPEVKFNWYVDGVEVHNAKTKPREEQYNSTY | |
| | | RVVSVLTVLHQDWLNGKEYKCKVSNKALPAPIEKTISKAEGQPREPQVYT | |
| | | LPPSREEMTKNQVSLTCLVKGFYPSDIAVEWESNGQPENNYKTTPPVLDS | |
| | | DGSFRLYSKLTVDKSRWQQGNVFSCSVMHEALHNHYTQKSLSLSPGK | |
| | T32/18 VK-CK | DIVMTQSPATLSVTPGDRVFLSCRASQSISDFLHWYQQKSHESPRLLIKY | 153 |
| | | ASQSISGIPSRFSGSGSGSDFTLSINSVEPEDVGVYFCQNGHNFPPTFGG | |
| | | GTKLEIKRTVAAPSVFIFPPSDEQLKSGTASVVCLLNNFYPREAKVQWKV | |
| | | DNALQSGNSQESVTEQDSKDSTYSLSSTLTLSKADYEKHKVYACEVTHQG | |
| | | LSSPVTKSFNRGEC | |
| DVD860 halfbody | Cetuximab VH- | QVQLKQSGPGLVQPSQSLSITCTVSGFSLTNYGVHWVRQSPGKGLEWLGV | 154 |
| | linker-AB002 VH- | IWSGGNTDYNTPFTSRLSINKDNSKSQVFFKMNSLQSNDTAIYYCARALT | |
| | CH1-hinge-CH2-CH3 | YYDYEFAYWGQGTLVTVSAASTKGPSVFPLAPQVQLQQSGAELARPGASV | |
| | (halfbody) | KMSCKASGYTFTRYTMHWVKQRPGQGLEWIGYINPSRGYTNYNQKFKDKA | |
| | | TLTTDKSSSTAYMQLSSLTSEDSAVYYCARYYDDHYCLDYWGQGTTLTVS | |
| | | SASTKGPSVFPLAPSSKSTSGGTAALGCLVKDYFPEPVTVSWNSGALTSG | |
| | | VHTFPAVLQSSGLYSLSSVVTVPSSSLGTQTYICNVNHKPSNTKVDKKVE | |
| | | PKSCDKTHTSPPSPAPELLGGPSVFLFPPKPKDTLMISRTPEVTCVVVDV | |
| | | SHEDPEVKFNWYVDGVEVHNAKTKPREEQYNSTYRVVSVLTVLHQDWLNG | |
| | | KEYKCKVSNKALPAPIEKTISKAKGQPREPQVYTLPPSREEMTKNQVSLT | |
| | | CLVKGFYPSDIAVEWESNGQPENNYKTTPPVLDSDGSFRLYSKLTVDKSR | |
| | | WQQGNVFSCSVMHEALHNHYTQKSLSLSPGK | |
| | Cetuximab VK- | DILLTQSPVILSVSPGERVSFSCRASQSIGTNIHWYQQRTNGSPRLLIKY | 155 |
| | linker-AB002 VK- | ASESISGIPSRFSGSGSGTDFTLSINSVESEDIADYYCQQNNNWPTTFGA | |
| | CK | GTKLELKRTVAAPSVFIFPPQIVLTQSPAIMSASPGEKVTMTCRASSSVS | |
| | | YMNWYQQKSGTSPKRWIYDTSKVASGVPYRFSGSGSGTSYSLTISSMEAE | |
| | | DAATYYCQQWSSNPLTFGSGTKLEINRTVAAPSVFIFPPSDEQLKSGTAS | |
| | | VVCLLNNFYPREAKVQWKVDNALQSGNSQESVTEQDSKDSTYSLSSTLTL | |
| | | SKADYEKHKVYACEVTHQGLSSPVTKSFNRGEC | |
| TMH6 | AB426 VH-linker- | QVQLVESGGGVVQPGRSLRLDCKASGITFSNSGMHWVRQAPGKGLEWVAV | 156 |
| | MH2-hinge- | IWYDGSKRYYADSVKGRFTISRDNSKNTLFLQMNSLRAEDTAVYYCATND | |
| | CH2(LALA)- | DYWGQGTLVTVSSASTELPPKVSVFVPPRDGFFGNPRKSKLICQATGFSP | |
| | CH3(knobs) | RQIQVSWLREGKQVGSGVTTDQVQAEAKESGPTTYKVTSTLTIKESDWLG | |
| | | QSMFTCRVDHRGLTFQQNASSMCDKTHTCPPCPAPEAAGGPSVFLFPPKP | |
| | | KDTLMISRTPEVTCVVVDVSHEDPEVKFNWYVDGVEVHNAKTKPREEQYN | |
| | | STYRVVSVLTVLHQDWLNGKEYKCKVSNKALPAPIEKTISKAKGQPREPQ | |
| | | VYTLPPSREEMTKNQVSLWCLVKGFYPSDIAVEWESNGQPENNYKTTPPV | |
| | | LDSDGSFFLYSKLTVDKSRWQQGNVFSCSVMHEALHNHYTQKSLSLSPGK | |
| | AB426 VL-linker- | EIVLTQSPATLSLSPGERATLSCRASQSVSSYLAWYQQKPGQAPRLLIYD | 157 |
| | MH2 | ASNRATGIPARFSGSGSGTDFTLTISSLEPEDFAVYYCQQSSNWPRTFGQ | |
| | | GTKVEIKRTAELPPKVSVFVPPRDGFFGNPRKSKLICQATGFSPRQIQVS | |
| | | WLREGKQVGSGVTTDQVQAEAKESGPTTYKVTSTLTIKESDWLGQSMFTC | |
| | | RVDHRGLTFQQNASSMC | |
| | Cetuximab.2 VH- | QVQLKQSGPGLVQPSQSLSITCTVSGFSLTNYGVHWVRQSPGKGLEWLGV | 158 |
| | linker-AB002.2 | IWSGGNTDYNTPFTSRLSINKDNSKSQVFFKMNSLQSEDTAIYYCARALT | |
| | VH-CH1-hinge- | YYDYEFAYWGQGTLVTVSAASTKGPSVFPLAPQVQLQQSGAELARPGASV | |
| | CH2(LALA)- | KMSCKASGYTFTRYTMHWVKQRPGQGLEWIGYINPSRGYTNYNQKFKDKA | |
| | CH3(holes) | TLTTDKSSSTAYMQLSSLTSEDSAVYYCARYYDDHYSLDYWGQGTTLTVS | |
| | | SASTKGPSVFPLAPSSKSTSGGTAALGCLVKDYFPEPVTVSWNSGALTSG | |
| | | VHTFPAVLQSSGLYSLSSVVTVPSSSLGTQTYICNVNHKPSNTKVDKKVE | |
| | | PKSCDKTHTCPPCPAPEAAGGPSVFLFPPKPKDTLMISRTPEVTCVVVDV | |
| | | SHEDPEVKFNWYVDGVEVHNAKTKPREEQYNSTYRVVSVLTVLHQDWLNG | |
| | | KEYKCKVSNKALPAPIEKTISKAKGQPREPQVYTLPPSREEMTKNQVSLS | |
| | | CAVKGFYPSDIAVEWESNGQPENNYKTTPPVLDSDGSFFLVSKLTVDKSR | |
| | | WQQGNVFSCSVMHEALHNHYTQKSLSLSPGK | |
| | Cetuximab.2 VK- | DILLTQSPVILSVSPGERVSFSCRASQSIGTNIHWYQQRTSGSPRLLIKY | 159 |
| | linker-AB002.2 | ASESISGIPSRFSGSGSGTDFTLSINSVESEDIADYYCQQNNNWPTTFGA | |
| | VK-CK | GTKLELKRTVAAPSVFIFPPQIVLTQSPAIMSASPGEKVTMTCRASSSVS | |
| | | YMNWYQQKSGTSPKRWIYDTSKVASGVPYRFSGSGSGTSYSLTISSMEAE | |
| | | DAATYYCQQWSSNPLTFGSGTKLEIKRTVAAPSVFIFPPSDEQLKSGTAS | |
| | | VVCLLNNFYPREAKVQWKVDNALQSGNSQESVTEQDSKDSTYSLSSTLTL | |
| | | SKADYEKHKVYACEVTHQGLSSPVTKSFNRGEC | |
| TMH7 | AB426 VH-linker- | QVQLVESGGGVVQPGRSLRLDCKASGITFSNSGMHWVRQAPGKGLEWVAV | 160 |
| | MH2n-hinge- | IWYDGSKRYYADSVKGRFTISRDNSKNTLFLQMNSLRAEDTAVYYCATND | |
| | CH2(LALA)- | DYWGQGTLVTVSSASTELPPKVSVFVPPRDGFFGNPRKSELICEATGFSP | |
| | CH3(knobs) | RQIQVSWLREGKQVGSGVTTDQVQAEAKESGPTTYDVTSTLTIKESDWLG | |
| | | QSMFTCRVDHRGLTFQQNASSMCDKTHTCPPCPAPEAAGGPSVFLFPPKP | |
| | | KDTLMISRTPEVTCVVVDVSHEDPEVKFNWYVDGVEVHNAKTKPREEQYN | |
| | | STYRVVSVLTVLHQDWLNGKEYKCKVSNKALPAPIEKTISKAKGQPREPQ | |
| | | VYTLPPSREEMTKNQVSLWCLVKGFYPSDIAVEWESNGQPENNYKTTPPV | |
| | | LDSDGSFFLYSKLTVDKSRWQQGNVFSCSVMHEALHNHYTQKSLSLSPGK | |
| | AB426 VL-linker- | EIVLTQSPATLSLSPGERATLSCRASQSVSSYLAWYQQKPGQAPRLLIYD | 161 |
| | MH2p | ASNRATGIPARFSGSGSGTDFTLTISSLEPEDFAVYYCQQSSNWPRTFGQ | |
| | | GTKVEIKRTAELPPKVSVFVPPRDGFFGNPRKSKLICKATGFSPRQIQVS | |
| | | WLREGKQVGSGVTTKQVQAEAKESGPTTYKVTSTLTIKESDWLGQSMFTC | |
| | | RVDHRGLTFQQNASSMC | |
| | Cetuximab.2 VH- | QVQLKQSGPGLVQPSQSLSITCTVSGFSLTNYGVHWVRQSPGKGLEWLGV | 162 |
| | linker-AB002.2 | IWSGGNTDYNTPFTSRLSINKDNSKSQVFFKMNSLQSEDTAIYYCARALT | |
| | VH-CH1-hinge- | YYDYEFAYWGQGTLVTVSAASTKGPSVFPLAPQVQLQQSGAELARPGASV | |
| | CH2(LALA)- | KMSCKASGYTFTRYTMHWVKQRPGQGLEWIGYINPSRGYTNYNQKFKDKA | |
| | CH3(holes) | TLTTDKSSSTAYMQLSSLTSEDSAVYYCARYYDDHYSLDYWGQGTTLTVS | |
| | | SASTKGPSVFPLAPSSKSTSGGTAALGCLVKDYFPEPVTVSWNSGALTSG | |
| | | VHTFPAVLQSSGLYSLSSVVTVPSSSLGTQTYICNVNHKPSNTKVDKKVE | |
| | | PKSCDKTHTCPPCPAPEAAGGPSVFLFPPKPKDTLMISRTPEVTCVVVDV | |
| | | SHEDPEVKFNWYVDGVEVHNAKTKPREEQYNSTYRVVSVLTVLHQDWLNG | |
| | | KEYKCKVSNKALPAPIEKTISKAKGQPREPQVYTLPPSREEMTKNQVSLS | |
| | | CAVKGFYPSDIAVEWESNGQPENNYKTTPPVLDSDGSFFLVSKLTVDKSR | |
| | | WQQGNVFSCSVMHEALHNHYTQKSLSLSPGK | |
| | Cetuximab.2 VK- | DILLTQSPVILSVSPGERVSFSCRASQSIGTNIHWYQQRTSGSPRLLIKY | 163 |
| | linker-AB002.2 | ASESISGIPSRFSGSGSGTDFTLSINSVESEDIADYYCQQNNNWPTTFGA | |
| | VK-CK | GTKLELKRTVAAPSVFIFPPQIVLTQSPAIMSASPGEKVTMTCRASSSVS | |
| | | YMNWYQQKSGTSPKRWIYDTSKVASGVPYRFSGSGSGTSYSLTISSMEAE | |
| | | DAATYYCQQWSSNPLTFGSGTKLEIKRTVAAPSVFIFPPSDEQLKSGTAS | |
| | | VVCLLNNFYPREAKVQWKVDNALQSGNSQESVTEQDSKDSTYSLSSTLTL | |
| | | SKADYEKHKVYACEVTHQGLSSPVTKSFNRGEC | |
| TMH8 | AB426 VH-linker- | QVQLVESGGGVVQPGRSLRLDCKASGITFSNSGMHWVRQAPGKGLEWVAV | 164 |
| | MH2p-hinge- | IWYDGSKRYYADSVKGRFTISRDNSKNTLFLQMNSLRAEDTAVYYCATND | |
| | CH2(LALA)- | DYWGQGTLVTVSSASTELPPKVSVFVPPRDGFFGNPRKSKLICKATGFSP | |
| | CH3(knobs) | RQIQVSWLREGKQVGSGVTTKQVQAEAKESGPTTYKVTSTLTIKESDWLG | |
| | | QSMFTCRVDHRGLTFQQNASSMCDKTHTCPPCPAPEAAGGPSVFLFPPKP | |
| | | KDTLMISRTPEVTCVVVDVSHEDPEVKFNWYVDGVEVHNAKTKPREEQYN | |
| | | STYRVVSVLTVLHQDWLNGKEYKCKVSNKALPAPIEKTISKAKGQPREPQ | |
| | | VYTLPPSREEMTKNQVSLWCLVKGFYPSDIAVEWESNGQPENNYKTTPPV | |
| | | LDSDGSFFLYSKLTVDKSRWQQGNVFSCSVMHEALHNHYTQKSLSLSPGK | |
| | AB426 VL-linker- | EIVLTQSPATLSLSPGERATLSCRASQSVSSYLAWYQQKPGQAPRLLIYD | 165 |
| | MH2n | ASNRATGIPARFSGSGSGTDFTLTISSLEPEDFAVYYCQQSSNWPRTFGQ | |
| | | GTKVEIKRTAELPPKVSVFVPPRDGFFGNPRKSELICEATGFSPRQIQVS | |
| | | WLREGKQVGSGVTTDQVQAEAKESGPTTYDVTSTLTIKESDWLGQSMFTC | |
| | | RVDHRGLTFQQNASSMC | |
| | Cetuximab.2 VH- | QVQLKQSGPGLVQPSQSLSITCTVSGFSLTNYGVHWVRQSPGKGLEWLGV | 166 |
| | linker-CD3.2 VH- | IWSGGNTDYNTPFTSRLSINKDNSKSQVFFKMNSLQSEDTAIYYCARALT | |
| | CH1-hinge- | YYDYEFAYWGQGTLVTVSAASTKGPSVFPLAPQVQLQQSGAELARPGASV | |
| | CH2(LALA)- | KMSCKASGYTFTRYTMHWVKQRPGQGLEWIGYINPSRGYTNYNQKFKDKA | |
| | CH3(holes) | TLTTDKSSSTAYMQLSSLTSEDSAVYYCARYYDDHYSLDYWGQGTTLTVS | |
| | | SASTKGPSVFPLAPSSKSTSGGTAALGCLVKDYFPEPVTVSWNSGALTSG | |
| | | VHTFPAVLQSSGLYSLSSVVTVPSSSLGTQTYICNVNHKPSNTKVDKKVE | |
| | | PKSCDKTHTCPPCPAPEGPSVFLFPPKPKDTLMISRTPEVTCVVVDV | |
| | | SHEDPEVKFNWYVDGVEVHNAKTKPREEQYNSTYRVVSVLTVLHQDWLNG | |
| | | KEYKCKVSNKALPAPIEKTISKAKGQPREPQVYTLPPSREEMTKNQVSLS | |
| | | CAVKGFYPSDIAVEWESNGQPENNYKTTPPVLDSDGSFFLVSKLTVDKSR | |
| | | WQQGNVFSCSVMHEALHNHYTQKSLSLSPGK | |
| | Cetuximab.2 VK- | DILLTQSPVILSVSPGERVSFSCRASQSIGTNIHWYQQRTSGSPRLLIKY | 167 |
| | linker-AB002.2 | ASESISGIPSRFSGSGSGTDFTLSINSVESEDIADYYCQQNNNWPTTFGA | |
| | VK-CK | GTKLELKRTVAAPSVFIFPPQIVLTQSPAIMSASPGEKVTMTCRASSSVS | |
| | | YMNWYQQKSGTSPKRWIYDTSKVASGVPYRFSGSGSGTSYSLTISSMEAE | |
| | | DAATYYCQQWSSNPLTFGSGTKLEIKRTVAAPSVFIFPPSDEQLKSGTAS | |
| | | VVCLLNNFYPREAKVQWKVDNALQSGNSQESVTEQDSKDSTYSLSSTLTL | |
| | | SKADYEKHKVYACEVTHQGLSSPVTKSFNRGEC | |
| TMH9 | AB426 VH-linker- | QVQLVESGGGVVQPGRSLRLDCKASGITFSNSGMHWVRQAPGKGLEWVAV | 168 |
| | MH2h-hinge- | IWYDGSKRYYADSVKGRFTISRDNSKNTLFLQMNSLRAEDTAVYYCATND | |
| | CH2(LALA)- | DYWGQGTLVTVSSASTELPPKVSVFVPPRDGFFGNPRKSKLACSATGFSP | |
| | CH3(knobs) | RQIQVSWLREGKQVGSGVTTDQVQAEAKESGPTTYKVASTLTIKESDWLG | |
| | | QSMFTCRVDHRGLTFQQNASSMCDKTHTCPPCPAPEAAGGPSVFLFPPKP | |
| | | KDTLMISRTPEVTCVVVDVSHEDPEVKFNWYVDGVEVHNAKTKPREEQYN | |
| | | STYRVVSVLTVLHQDWLNGKEYKCKVSNKALPAPIEKTISKAKGQPREPQ | |
| | | VYTLPPSREEMTKNQVSLWCLVKGFYPSDIAVEWESNGQPENNYKTTPPV | |
| | | LDSDGSFFLYSKLTVDKSRWQQGNVFSCSVMHEALHNHYTQKSLSLSPGK | |
| | AB426 VL-linker- | EIVLTQSPATLSLSPGERATLSCRASQSVSSYLAWYQQKPGQAPRLLIYD | 169 |
| | MH2k | ASNRATGIPARFSGSGSGTDFTLTISSLEPEDFAVYYCQQSSNWPRTFGQ | |
| | | GTKVEIKRTAELPPKVSVFVPPRDGFFGNPRKSKLWCQATGFSPRQIQVS | |
| | | WLREGKQVGSGVTTDQVQAEAKESGPTTYKVTSTLTIKESDWLGQSMFTC | |
| | | RVDHRGLTFQQNASSMC | |
| | Cetuximab.2 VH- | QVQLKQSGPGLVQPSQSLSITCTVSGFSLTNYGVHWVRQSPGKGLEWLGV | 170 |
| | linker-AB002.2 | IWSGGNTDYNTPFTSRLSINKDNSKSQVFFKMNSLQSEDTAIYYCARALT | |
| | VH-CH1-hinge- | YYDYEFAYWGQGTLVTVSAASTKGPSVFPLAPQVQLQQSGAELARPGASV | |
| | CH2(LALA)- | KMSCKASGYTFTRYTMHWVKQRPGQGLEWIGYINPSRGYTNYNQKFKDKA | |
| | CH3(holes) | TLTTDKSSSTAYMQLSSLTSEDSAVYYCARYYDDHYSLDYWGQGTTLTVS | |
| | | SASTKGPSVFPLAPSSKSTSGGTAALGCLVKDYFPEPVTVSWNSGALTSG | |
| | | VHTFPAVLQSSGLYSLSSVVTVPSSSLGTQTYICNVNHKPSNTKVDKKVE | |
| | | PKSCDKTHTCPPCPAPEAAGGPSVFLFPPKPKDTLMISRTPEVTCVVVDV | |
| | | SHEDPEVKFNWYVDGVEVHNAKTKPREEQYNSTYRVVSVLTVLHQDWLNG | |
| | | KEYKCKVSNKALPAPIEKTISKAKGQPREPQVYTLPPSREEMTKNQVSLS | |
| | | CAVKGFYPSDIAVEWESNGQPENNYKTTPPVLDSDGSFFLVSKLTVDKSR | |
| | | WQQGNVFSCSVMHEALHNHYTQKSLSLSPGK | |
| | Cetuximab.2 VK- | DILLTQSPVILSVSPGERVSFSCRASQSIGTNIHWYQQRTSGSPRLLIKY | 171 |
| | linker-AB002.2 | ASESISGIPSRFSGSGSGTDFTLSINSVESEDIADYYCQQNNNWPTTFGA | |
| | VK-CK | GTKLELKRTVAAPSVFIFPPQIVLTQSPAIMSASPGEKVTMTCRASSSVS | |
| | | YMNWYQQKSGTSPKRWIYDTSKVASGVPYRFSGSGSGTSYSLTISSMEAE | |
| | | DAATYYCQQWSSNPLTFGSGTKLEIKRTVAAPSVFIFPPSDEQLKSGTAS | |
| | | VVCLLNNFYPREAKVQWKVDNALQSGNSQESVTEQDSKDSTYSLSSTLTL | |
| | | SKADYEKHKVYACEVTHQGLSSPVTKSFNRGEC | |
| TMH-1.0 | AB426 VH-linker- | QVQLVESGGGVVQPGRSLRLDCKASGITFSNSGMHWVRQAPGKGLEWVAV | 172 |
| | MH2k-hinge- | IWYDGSKRYYADSVKGRFTISRDNSKNTLFLQMNSLRAEDTAVYYCATND | |
| | CH2(LALA)- | DYWGQGTLVTVSSASTELPPKVSVFVPPRDGFFGNPRKSKLWCQATGFSP | |
| | CH3(knobs) | RQIQVSWLREGKQVGSGVTTDQVQAEAKESGPTTYKVTSTLTIKESDWLG | |
| | | QSMFTCRVDHRGLTFQQNASSMCDKTHTCPPCPAPEAAGGPSVFLFPPKP | |
| | | KDTLMISRTPEVTCVVVDVSHEDPEVKFNWYVDGVEVHNAKTKPREEQYN | |
| | | STYRVVSVLTVLHQDWLNGKEYKCKVSNKALPAPIEKTISKAKGQPREPQ | |
| | | VYTLPPSREEMTKNQVSLWCLVKGFYPSDIAVEWESNGQPENNYKTTPPV | |
| | | LDSDGSFFLYSKLTVDKSRWQQGNVFSCSVMHEALHNHYTQKSLSLSPGK | |
| | AB426 VL-linker- | EIVLTQSPATLSLSPGERATLSCRASQSVSSYLAWYQQKPGQAPRLLIYD | 173 |
| | MH2h | ASNRATGIPARFSGSGSGTDFTLTISSLEPEDFAVYYCQQSSNWPRTFGQ | |
| | | GTKVEIKRTAELPPKVSVFVPPRDGFFGNPRKSKLACSATGFSPRQIQVS | |
| | | WLREGKQVGSGVTTDQVQAEAKESGPTTYKVASTLTIKESDWLGQSMFTC | |
| | | RVDHRGLTFQQNASSMC | |
| | Cetuximab.2 VH- | QVQLKQSGPGLVQPSQSLSITCTVSGFSLTNYGVHWVRQSPGKGLEWLGV | 174 |
| | linker-AB002.2 | IWSGGNTDYNTPFTSRLSINKDNSKSQVFFKMNSLQSEDTAIYYCARALT | |
| | VH-CH1-hinge- | YYDYEFAYWGQGTLVTVSAASTKGPSVFPLAPQVQLQQSGAELARPGASV | |
| | CH2(LALA)- | KMSCKASGYTFTRYTMHWVKQRPGQGLEWIGYINPSRGYTNYNQKFKDKA | |
| | CH3(holes) | TLTTDKSSSTAYMQLSSLTSEDSAVYYCARYYDDHYSLDYWGQGTTLTVS | |
| | | SASTKGPSVFPLAPSSKSTSGGTAALGCLVKDYFPEPVTVSWNSGALTSG | |
| | | VHTFPAVLQSSGLYSLSSVVTVPSSSLGTQTYICNVNHKPSNTKVDKKVE | |
| | | PKSCDKTHTCPPCPAPEAAGGPSVFLFPPKPKDTLMISRTPEVTCVVVDV | |
| | | SHEDPEVKFNWYVDGVEVHNAKTKPREEQYNSTYRVVSVLTVLHQDWLNG | |
| | | KEYKCKVSNKALPAPIEKTISKAKGQPREPQVYTLPPSREEMTKNQVSLS | |
| | | CAVKGFYPSDIAVEWESNGQPENNYKTTPPVLDSDGSFFLVSKLTVDKSR | |
| | | WQQGNVFSCSVMHEALHNHYTQKSLSLSPGK | |
| | Cetuximab.2 VK- | DILLTQSPVILSVSPGERVSFSCRASQSIGTNIHWYQQRTSGSPRLLIKY | 175 |
| | linker-AB002.2 | ASESISGIPSRFSGSGSGTDFTLSINSVESEDIADYYCQQNNNWPTTFGA | |
| | VK-CK | GTKLELKRTVAAPSVFIFPPQIVLTQSPAIMSASPGEKVTMTCRASSSVS | |
| | | YMNWYQQKSGTSPKRWIYDTSKVASGVPYRFSGSGSGTSYSLTISSMEAE | |
| | | DAATYYCQQWSSNPLTFGSGTKLEIKRTVAAPSVFIFPPSDEQLKSGTAS | |
| | | VVCLLNNFYPREAKVQWKVDNALQSGNSQESVTEQDSKDSTYSLSSTLTL | |
| | | SKADYEKHKVYACEVTHQGLSSPVTKSFNRGEC | |
| TMH-1.1 | YW243 VH-linker- | EVQLVESGGGLVQPGGSLRLSCAASGFTFSDSWIHWVRQAPGKGLEWVAW | 176 |
| | MH2-hinge- | ISPYGGSTYYADSVKGRFTISADTSKNTAYLQMNSLRAEDTAVYYCARRH | |
| | CH2(LALA)-CH3 | YPGGFDYWGQGTLVTVSAASTELPPKVSVFVPPRDGFFGNPRKSKLICQA | |
| | (knobs) | TGFSPRQIQVSWLREGKQVGSGVTTDQVQAEAKESGPTTYKVTSTLTIKE | |
| | | SDWLGQSMFTCRVDHRGLTFQQNASSMCDKTHTCPPCPAPEAAGGPSVFL | |
| | | FPPKPKDTLMISRTPEVTCVVVDVSHEDPEVKFNWYVDGVEVHNAKTKPR | |
| | | EEQYNSTYRVVSVLTVLHQDWLNGKEYKCKVSNKALPAPIEKTISKAKGQ | |
| | | PREPQVYTLPPSREEMTKNQVSLWCLVKGFYPSDIAVEWESNGQPENNYK | |
| | | TTPPVLDSDGSFFLYSKLTVDKSRWQQGNVFSCSVMHEALHNHYTQKSLS | |
| | | LSPGK | |
| | YW243 VK-linker- | DIQMTQSPSSLSASVGDRVTITCRASQDVSTAVAWYQQKPGKAPKLLIYS | 177 |
| | MH2 | ASFLYSGVPSRFSGSGSGTDFTLTISSLQPEDFATYYCQQYLYHPATFGQ | |
| | | GTKVEIKRTAELPPKVSVFVPPRDGFFGNPRKSKLICQATGFSPRQIQVS | |
| | | WLREGKQVGSGVTTDQVQAEAKESGPTTYKVTSTLTIKESDWLGQSMFTC | |
| | | RVDHRGLTFQQNASSMC | |
| | Cetuximab.2 VH- | QVQLKQSGPGLVQPSQSLSITCTVSGFSLTNYGVHWVRQSPGKGLEWLGV | 178 |
| | linker-AB002.2 | IWSGGNTDYNTPFTSRLSINKDNSKSQVFFKMNSLQSEDTAIYYCARALT | |
| | VH-CH1-hinge- | YYDYEFAYWGQGTLVTVSAASTKGPSVFPLAPQVQLQQSGAELARPGASV | |
| | CH2(LALA)- | KMSCKASGYTFTRYTMHWVKQRPGQGLEWIGYINPSRGYTNYNQKFKDKA | |
| | CH3(holes) | TLTTDKSSSTAYMQLSSLTSEDSAVYYCARYYDDHYSLDYWGQGTTLTVS | |
| | | SASTKGPSVFPLAPSSKSTSGGTAALGCLVKDYFPEPVTVSWNSGALTSG | |
| | | VHTFPAVLQSSGLYSLSSVVTVPSSSLGTQTYICNVNHKPSNTKVDKKVE | |
| | | PKSCDKTHTCPPCPAPEAAGGPSVFLFPPKPKDTLMISRTPEVTCVVVDV | |
| | | SHEDPEVKFNWYVDGVEVHNAKTKPREEQYNSTYRVVSVLTVLHQDWLNG | |
| | | KEYKCKVSNKALPAPIEKTISKAKGQPREPQVYTLPPSREEMTKNQVSLS | |
| | | CAVKGFYPSDIAVEWESNGQPENNYKTTPPVLDSDGSFFLVSKLTVDKSR | |
| | | WQQGNVFSCSVMHEALHNHYTQKSLSLSPGK | |
| | Cetuximab.2 VK- | DILLTQSPVILSVSPGERVSFSCRASQSIGTNIHWYQQRTSGSPRLLIKY | 179 |
| | linker-AB002.2 | ASESISGIPSRFSGSGSGTDFTLSINSVESEDIADYYCQQNNNWPTTFGA | |
| | VK-CK | GTKLELKRTVAAPSVFIFPPQIVLTQSPAIMSASPGEKVTMTCRASSSVS | |
| | | YMNWYQQKSGTSPKRWIYDTSKVASGVPYRFSGSGSGTSYSLTISSMEAE | |
| | | DAATYYCQQWSSNPLTFGSGTKLEIKRTVAAPSVFIFPPSDEQLKSGTAS | |
| | | VVCLLNNFYPREAKVQWKVDNALQSGNSQESVTEQDSKDSTYSLSSTLTL | |
| | | SKADYEKHKVYACEVTHQGLSSPVTKSFNRGEC | |
| TMH12 | YW243 VH-linker- | EVQLVESGGGLVQPGGSLRLSCAASGFTFSDSWIHWVRQAPGKGLEWVAW | 180 |
| | MH2n-hinge- | ISPYGGSTYYADSVKGRFTISADTSKNTAYLQMNSLRAEDTAVYYCARRH | |
| | CH2(LALA)-CH3 | YPGGFDYWGQGTLVTVSAASTELPPKVSVFVPPRDGFFGNPRKSELICEA | |
| | (knobs) | TGFSPRQIQVSWLREGKQVGSGVTTDQVQAEAKESGPTTYDVTSTLTIKE | |
| | | SDWLGQSMFTCRVDHRGLTFQQNASSMCDKTHTCPPCPAPEAAGGPSVFL | |
| | | FPPKPKDTLMISRTPEVTCVVVDVSHEDPEVKFNWYVDGVEVHNAKTKPR | |
| | | EEQYNSTYRVVSVLTVLHQDWLNGKEYKCKVSNKALPAPIEKTISKAKGQ | |
| | | PREPQVYTLPPSREEMTKNQVSLWCLVKGFYPSDIAVEWESNGQPENNYK | |
| | | TTPPVLDSDGSFFLYSKLTVDKSRWQQGNVFSCSVMHEALHNHYTQKSLS | |
| | | LSPGK | |
| | YW243 VK-linker- | DIQMTQSPSSLSASVGDRVTITCRASQDVSTAVAWYQQKPGKAPKLLIYS | 181 |
| | MH2p | ASFLYSGVPSRFSGSGSGTDFTLTISSLQPEDFATYYCQQYLYHPATFGQ | |
| | | GTKVEIKRTAELPPKVSVFVPPRDGFFGNPRKSKLICKATGFSPRQIQVS | |
| | | WLREGKQVGSGVTTKQVQAEAKESGPTTYKVTSTLTIKESDWLGQSMFTC | |
| | | RVDHRGLTFQQNASSMC | |
| | Cetuximab.2 VH- | QVQLKQSGPGLVQPSQSLSITCTVSGFSLTNYGVHWVRQSPGKGLEWLGV | 182 |
| | linker-AB002.2 | IWSGGNTDYNTPFTSRLSINKDNSKSQVFFKMNSLQSEDTAIYYCARALT | |
| | VH-CH1-hinge- | YYDYEFAYWGQGTLVTVSAASTKGPSVFPLAPQVQLQQSGAELARPGASV | |
| | CH2(LALA)- | KMSCKASGYTFTRYTMHWVKQRPGQGLEWIGYINPSRGYTNYNQKFKDKA | |
| | CH3(holes) | TLTTDKSSSTAYMQLSSLTSEDSAVYYCARYYDDHYSLDYWGQGTTLTVS | |
| | | SASTKGPSVFPLAPSSKSTSGGTAALGCLVKDYFPEPVTVSWNSGALTSG | |
| | | VHTFPAVLQSSGLYSLSSVVTVPSSSLGTQTYICNVNHKPSNTKVDKKVE | |
| | | PKSCDKTHTCPPCPAPEAAGGPSVFLFPPKPKDTLMISRTPEVTCVVVDV | |
| | | SHEDPEVKFNWYVDGVEVHNAKTKPREEQYNSTYRVVSVLTVLHQDWLNG | |
| | | KEYKCKVSNKALPAPIEKTISKAKGQPREPQVYTLPPSREEMTKNQVSLS | |
| | | CAVKGFYPSDIAVEWESNGQPENNYKTTPPVLDSDGSFFLVSKLTVDKSR | |
| | | WQQGNVFSCSVMHEALHNHYTQKSLSLSPGK | |
| | Cetuximab.2 VK- | DILLTQSPVILSVSPGERVSFSCRASQSIGTNIHWYQQRTSGSPRLLIKY | 183 |
| | linker-AB002.2 | ASESISGIPSRFSGSGSGTDFTLSINSVESEDIADYYCQQNNNWPTTFGA | |
| | VK-CK | GTKLELKRTVAAPSVFIFPPQIVLTQSPAIMSASPGEKVTMTCRASSSVS | |
| | | YMNWYQQKSGTSPKRWIYDTSKVASGVPYRFSGSGSGTSYSLTISSMEAE | |
| | | DAATYYCQQWSSNPLTFGSGTKLEIKRTVAAPSVFIFPPSDEQLKSGTAS | |
| | | VVCLLNNFYPREAKVQWKVDNALQSGNSQESVTEQDSKDSTYSLSSTLTL | |
| | | SKADYEKHKVYACEVTHQGLSSPVTKSFNRGEC | |
| TMH13 | YW243 VH-linker- | EVQLVESGGGLVQPGGSLRLSCAASGFTFSDSWIHWVRQAPGKGLEWVAW | 184 |
| | MH2p-hinge- | ISPYGGSTYYADSVKGRFTISADTSKNTAYLQMNSLRAEDTAVYYCARRH | |
| | CH2(LALA)-CH3 | YPGGFDYWGQGTLVTVSAASTELPPKVSVFVPPRDGFFGNPRKSKLICKA | |
| | (knobs) | TGFSPRQIQVSWLREGKQVGSGVTTKQVQAEAKESGPTTYKVTSTLTIKE | |
| | | SDWLGQSMFTCRVDHRGLTFQQNASSMCDKTHTCPPCPAPEAAGGPSVFL | |
| | | FPPKPKDTLMISRTPEVTCVVVDVSHEDPEVKFNWYVDGVEVHNAKTKPR | |
| | | EEQYNSTYRVVSVLTVLHQDWLNGKEYKCKVSNKALPAPIEKTISKAKGQ | |
| | | PREPQVYTLPPSREEMTKNQVSLWCLVKGFYPSDIAVEWESNGQPENNYK | |
| | | TTPPVLDSDGSFFLYSKLTVDKSRWQQGNVFSCSVMHEALHNHYTQKSLS | |
| | | LSPGK | |
| | YW243 VK-linker- | DIQMTQSPSSLSASVGDRVTITCRASQDVSTAVAWYQQKPGKAPKLLIYS | 185 |
| | MH2n | ASFLYSGVPSRFSGSGSGTDFTLTISSLQPEDFATYYCQQYLYHPATFGQ | |
| | | GTKVEIKRTAELPPKVSVFVPPRDGFFGNPRKSELICEATGFSPRQIQVS | |
| | | WLREGKQVGSGVTTDQVQAEAKESGPTTYDVTSTLTIKESDWLGQSMFTC | |
| | | RVDHRGLTFQQNASSMC | |
| | Cetuximab.2 VH- | QVQLKQSGPGLVQPSQSLSITCTVSGFSLTNYGVHWVRQSPGKGLEWLGV | 186 |
| | linker-AB002.2 | IWSGGNTDYNTPFTSRLSINKDNSKSQVFFKMNSLQSEDTAIYYCARALT | |
| | VH-CH1-hinge- | YYDYEFAYWGQGTLVTVSAASTKGPSVFPLAPQVQLQQSGAELARPGASV | |
| | CH2(LALA)- | KMSCKASGYTFTRYTMHWVKQRPGQGLEWIGYINPSRGYTNYNQKFKDKA | |
| | CH3(holes) | TLTTDKSSSTAYMQLSSLTSEDSAVYYCARYYDDHYSLDYWGQGTTLTVS | |
| | | SASTKGPSVFPLAPSSKSTSGGTAALGCLVKDYFPEPVTVSWNSGALTSG | |
| | | VHTFPAVLQSSGLYSLSSVVTVPSSSLGTQTYICNVNHKPSNTKVDKKVE | |
| | | PKSCDKTHTCPPCPAPEAAGGPSVFLFPPKPKDTLMISRTPEVTCVVVDV | |
| | | SHEDPEVKFNWYVDGVEVHNAKTKPREEQYNSTYRVVSVLTVLHQDWLNG | |
| | | KEYKCKVSNKALPAPIEKTISKAKGQPREPQVYTLPPSREEMTKNQVSLS | |
| | | CAVKGFYPSDIAVEWESNGQPENNYKTTPPVLDSDGSFFLVSKLTVDKSR | |
| | | WQQGNVFSCSVMHEALHNHYTQKSLSLSPGK | |
| | Cetuximab.2 VK- | DILLTQSPVILSVSPGERVSFSCRASQSIGTNIHWYQQRTSGSPRLLIKY | 187 |
| | linker-AB002.2 | ASESISGIPSRFSGSGSGTDFTLSINSVESEDIADYYCQQNNNWPTTFGA | |
| | VK-CK | GTKLELKRTVAAPSVFIFPPQIVLTQSPAIMSASPGEKVTMTCRASSSVS | |
| | | YMNWYQQKSGTSPKRWIYDTSKVASGVPYRFSGSGSGTSYSLTISSMEAE | |
| | | DAATYYCQQWSSNPLTFGSGTKLEIKRTVAAPSVFIFPPSDEQLKSGTAS | |
| | | VVCLLNNFYPREAKVQWKVDNALQSGNSQESVTEQDSKDSTYSLSSTLTL | |
| | | SKADYEKHKVYACEVTHQGLSSPVTKSFNRGEC | |
| TMH14 | YW243 VH-linker- | EVQLVESGGGLVQPGGSLRLSCAASGFTFSDSWIHWVRQAPGKGLEWVAW | 188 |
| | MH2h-hinge- | ISPYGGSTYYADSVKGRFTISADTSKNTAYLQMNSLRAEDTAVYYCARRH | |
| | CH2(LALA)-CH3 | YPGGFDYWGQGTLVTVSAASTELPPKVSVFVPPRDGFFGNPRKSKLACSA | |
| | (knobs) | TGFSPRQIQVSWLREGKQVGSGVTTDQVQAEAKESGPTTYKVASTLTIKE | |
| | | SDWLGQSMFTCRVDHRGLTFQQNASSMCDKTHTCPPCPAPEAAGGPSVFL | |
| | | FPPKPKDTLMISRTPEVTCVVVDVSHEDPEVKFNWYVDGVEVHNAKTKPR | |
| | | EEQYNSTYRVVSVLTVLHQDWLNGKEYKCKVSNKALPAPIEKTISKAKGQ | |
| | | PREPQVYTLPPSREEMTKNQVSLWCLVKGFYPSDIAVEWESNGQPENNYK | |
| | | TTPPVLDSDGSFFLYSKLTVDKSRWQQGNVFSCSVMHEALHNHYTQKSLS | |
| | | LSPGK | |
| | YW243 VK-linker- | DIQMTQSPSSLSASVGDRVTITCRASQDVSTAVAWYQQKPGKAPKLLIYS | 189 |
| | MH2k | ASFLYSGVPSRFSGSGSGTDFTLTISSLQPEDFATYYCQQYLYHPATFGQ | |
| | | GTKVEIKRTAELPPKVSVFVPPRDGFFGNPRKSKLWCQATGFSPRQIQVS | |
| | | WLREGKQVGSGVTTDQVQAEAKESGPTTYKVTSTLTIKESDWLGQSMFTC | |
| | | RVDHRGLTFQQNASSMC | |
| | Cetuximab.2 VH- | QVQLKQSGPGLVQPSQSLSITCTVSGFSLTNYGVHWVRQSPGKGLEWLGV | 190 |
| | linker-AB002.2 | IWSGGNTDYNTPFTSRLSINKDNSKSQVFFKMNSLQSEDTAIYYCARALT | |
| | VH-CH1-hinge- | YYDYEFAYWGQGTLVTVSAASTKGPSVFPLAPQVQLQQSGAELARPGASV | |
| | CH2(LALA)- | KMSCKASGYTFTRYTMHWVKQRPGQGLEWIGYINPSRGYTNYNQKFKDKA | |
| | CH3(holes) | TLTTDKSSSTAYMQLSSLTSEDSAVYYCARYYDDHYSLDYWGQGTTLTVS | |
| | | SASTKGPSVFPLAPSSKSTSGGTAALGCLVKDYFPEPVTVSWNSGALTSG | |
| | | VHTFPAVLQSSGLYSLSSVVTVPSSSLGTQTYICNVNHKPSNTKVDKKVE | |
| | | PKSCDKTHTCPPCPAPEAAGGPSVFLFPPKPKDTLMISRTPEVTCVVVDV | |
| | | SHEDPEVKFNWYVDGVEVHNAKTKPREEQYNSTYRVVSVLTVLHQDWLNG | |
| | | KEYKCKVSNKALPAPIEKTISKAKGQPREPQVYTLPPSREEMTKNQVSLS | |
| | | CAVKGFYPSDIAVEWESNGQPENNYKTTPPVLDSDGSFFLVSKLTVDKSR | |
| | | WQQGNVFSCSVMHEALHNHYTQKSLSLSPGK | |
| | Cetuximab.2 VK- | DILLTQSPVILSVSPGERVSFSCRASQSIGTNIHWYQQRTSGSPRLLIKY | 191 |
| | linker-AB002.2 | ASESISGIPSRFSGSGSGTDFTLSINSVESEDIADYYCQQNNNWPTTFGA | |
| | VK-CK | GTKLELKRTVAAPSVFIFPPQIVLTQSPAIMSASPGEKVTMTCRASSSVS | |
| | | YMNWYQQKSGTSPKRWIYDTSKVASGVPYRFSGSGSGTSYSLTISSMEAE | |
| | | DAATYYCQQWSSNPLTFGSGTKLEIKRTVAAPSVFIFPPSDEQLKSGTAS | |
| | | VVCLLNNFYPREAKVQWKVDNALQSGNSQESVTEQDSKDSTYSLSSTLTL | |
| | | SKADYEKHKVYACEVTHQGLSSPVTKSFNRGEC | |
| TMH15 | YW243 VH-linker- | EVQLVESGGGLVQPGGSLRLSCAASGFTFSDSWIHWVRQAPGKGLEWVAW | 192 |
| | MH2k-hinge- | ISPYGGSTYYADSVKGRFTISADTSKNTAYLQMNSLRAEDTAVYYCARRH | |
| | CH2(LALA)- | YPGGFDYWGQGTLVTVSAASTELPPKVSVFVPPRDGFFGNPRKSKLWCQA | |
| | CH3(knobs) | TGFSPRQIQVSWLREGKQVGSGVTTDQVQAEAKESGPTTYKVTSTLTIKE | |
| | | SDWLGQSMFTCRVDHRGLTFQQNASSMCDKTHTCPPCPAPEAAGGPSVFL | |
| | | FPPKPKDTLMISRTPEVTCVVVDVSHEDPEVKFNWYVDGVEVHNAKTKPR | |
| | | EEQYNSTYRVVSVLTVLHQDWLNGKEYKCKVSNKALPAPIEKTISKAKGQ | |
| | | PREPQVYTLPPSREEMTKNQVSLWCLVKGFYPSDIAVEWESNGQPENNYK | |
| | | TTPPVLDSDGSFFLYSKLTVDKSRWQQGNVFSCSVMHEALHNHYTQKSLS | |
| | | LSPGK | |
| | YW243 VK-linker- | DIQMTQSPSSLSASVGDRVTITCRASQDVSTAVAWYQQKPGKAPKLLIYS | 193 |
| | MH2h | ASFLYSGVPSRFSGSGSGTDFTLTISSLQPEDFATYYCQQYLYHPATFGQ | |
| | | GTKVEIKRTAELPPKVSVFVPPRDGFFGNPRKSKLACSATGFSPRQIQVS | |
| | | WLREGKQVGSGVTTDQVQAEAKESGPTTYKVASTLTIKESDWLGQSMFTC | |
| | | RVDHRGLTFQQNASSMC | |
| | Cetuximab.2 VH- | QVQLKQSGPGLVQPSQSLSITCTVSGFSLTNYGVHWVRQSPGKGLEWLGV | 194 |
| | linker-AB002.2 | IWSGGNTDYNTPFTSRLSINKDNSKSQVFFKMNSLQSEDTAIYYCARALT | |
| | VH-CH1-hinge- | YYDYEFAYWGQGTLVTVSAASTKGPSVFPLAPQVQLQQSGAELARPGASV | |
| | CH2(LALA)- | KMSCKASGYTFTRYTMHWVKQRPGQGLEWIGYINPSRGYTNYNQKFKDKA | |
| | CH3(holes) | TLTTDKSSSTAYMQLSSLTSEDSAVYYCARYYDDHYSLDYWGQGTTLTVS | |
| | | SASTKGPSVFPLAPSSKSTSGGTAALGCLVKDYFPEPVTVSWNSGALTSG | |
| | | VHTFPAVLQSSGLYSLSSVVTVPSSSLGTQTYICNVNHKPSNTKVDKKVE | |
| | | PKSCDKTHTCPPCPAPEAAGGPSVFLFPPKPKDTLMISRTPEVTCVVVDV | |
| | | SHEDPEVKFNWYVDGVEVHNAKTKPREEQYNSTYRVVSVLTVLHQDWLNG | |
| | | KEYKCKVSNKALPAPIEKTISKAKGQPREPQVYTLPPSREEMTKNQVSLS | |
| | | CAVKGFYPSDIAVEWESNGQPENNYKTTPPVLDSDGSFFLVSKLTVDKSR | |
| | | WQQGNVFSCSVMHEALHNHYTQKSLSLSPGK | |
| | Cetuximab.2 VK- | DILLTQSPVILSVSPGERVSFSCRASQSIGTNIHWYQQRTSGSPRLLIKY | 195 |
| | linker-AB002.2 | ASESISGIPSRFSGSGSGTDFTLSINSVESEDIADYYCQQNNNWPTTFGA | |
| | VK-CK | GTKLELKRTVAAPSVFIFPPQIVLTQSPAIMSASPGEKVTMTCRASSSVS | |
| | | YMNWYQQKSGTSPKRWIYDTSKVASGVPYRFSGSGSGTSYSLTISSMEAE | |
| | | DAATYYCQQWSSNPLTFGSGTKLEIKRTVAAPSVFIFPPSDEQLKSGTAS | |
| | | VVCLLNNFYPREAKVQWKVDNALQSGNSQESVTEQDSKDSTYSLSSTLTL | |
| | | SKADYEKHKVYACEVTHQGLSSPVTKSFNRGEC | |
| TMH16 | YW243 VH-linker- | EVQLVESGGGLVQPGGSLRLSCAASGFTFSDSWIHWVRQAPGKGLEWVAW | 196 |
| | MH2-hinge- | ISPYGGSTYYADSVKGRFTISADTSKNTAYLQMNSLRAEDTAVYYCARRH | |
| | CH2(LALA)-CH3 | YPGGFDYWGQGTLVTVSAASTELPPKVSVFVPPRDGFFGNPRKSKLICQA | |
| | (knobs) | TGFSPRQIQVSWLREGKQVGSGVTTDQVQAEAKESGPTTYKVTSTLTIKE | |
| | | SDWLGQSMFTCRVDHRGLTFQQNASSMCDKTHTCPPCPAPEAAGGPSVFL | |
| | | FPPKPKDTLMISRTPEVTCVVVDVSHEDPEVKFNWYVDGVEVHNAKTKPR | |
| | | EEQYNSTYRVVSVLTVLHQDWLNGKEYKCKVSNKALPAPIEKTISKAKGQ | |
| | | PREPQVYTLPPSREEMTKNQVSLWCLVKGFYPSDIAVEWESNGQPENNYK | |
| | | TTPPVLDSDGSFFLYSKLTVDKSRWQQGNVFSCSVMHEALHNHYTQKSLS | |
| | | LSPGK | |
| | YW243 VK-linker- | DIQMTQSPSSLSASVGDRVTITCRASQDVSTAVAWYQQKPGKAPKLLIYS | 197 |
| | MH2 | ASFLYSGVPSRFSGSGSGTDFTLTISSLQPEDFATYYCQQYLYHPATFGQ | |
| | | GTKVEIKRTAELPPKVSVFVPPRDGFFGNPRKSKLICQATGFSPRQIQVS | |
| | | WLREGKQVGSGVTTDQVQAEAKESGPTTYKVTSTLTIKESDWLGQSMFTC | |
| | | RVDHRGLTFQQNASSMC | |
| | Cetuximab VH- | QVQLKQSGPGLVQPSQSLSITCTVSGFSLTNYGVHWVRQSPGKGLEWLGV | 198 |
| | linker-AB002 VH- | IWSGGNTDYNTPFTSRLSINKDNSKSQVFFKMNSLQSNDTAIYYCARALT | |
| | CH1-hinge- | YYDYEFAYWGQGTLVTVSAASTKGPSVFPLAPQVQLQQSGAELARPGASV | |
| | CH2(LALA)- | KMSCKASGYTFTRYTMHWVKQRPGQGLEWIGYINPSRGYTNYNQKFKDKA | |
| | CH3(holes) | TLTTDKSSSTAYMQLSSLTSEDSAVYYCARYYDDHYCLDYWGQGTTLTVS | |
| | | SASTKGPSVFPLAPSSKSTSGGTAALGCLVKDYFPEPVTVSWNSGALTSG | |
| | | VHTFPAVLQSSGLYSLSSVVTVPSSSLGTQTYICNVNHKPSNTKVDKKVE | |
| | | PKSCDKTHTCPPCPAPEAAGGPSVFLFPPKPKDTLMISRTPEVTCVVVDV | |
| | | SHEDPEVKFNWYVDGVEVHNAKTKPREEQYNSTYRVVSVLTVLHQDWLNG | |
| | | KEYKCKVSNKALPAPIEKTISKAKGQPREPQVYTLPPSREEMTKNQVSLS | |
| | | CAVKGFYPSDIAVEWESNGQPENNYKTTPPVLDSDGSFFLVSKLTVDKSR | |
| | | WQQGNVFSCSVMHEALHNHYTQKSLSLSPGK | |
| | Cetuximab VK- | DILLTQSPVILSVSPGERVSFSCRASQSIGTNIHWYQQRTNGSPRLLIKY | 199 |
| | linker-AB002 VK- | ASESISGIPSRFSGSGSGTDFTLSINSVESEDIADYYCQQNNNWPTTFGA | |
| | CK | GTKLELKRTVAAPSVFIFPPQIVLTQSPAIMSASPGEKVTMTCRASSSVS | |
| | | YMNWYQQKSGTSPKRWIYDTSKYASDVPYRFSGSGSGTSYSLTISSMEAE | |
| | | DAATYYCQQWSSNPLTFGSGTKLEINRTVAAPSVFIFPPSDEQLKSGTAS | |
| | | VVCLLNNFYPREAKVQWKVDNALQSGNSQESVTEQDSKDSTYSLSSTLTL | |
| | | SKADYEKHKVYACEVTHQGLSSPVTKSFNRGEC | |
| TMH17 | YW243 VH-linker- | EVQLVESGGGLVQPGGSLRLSCAASGFTFSDSWIHWVRQAPGKGLEWVAW | 200 |
| | MH2n-hinge- | ISPYGGSTYYADSVKGRFTISADTSKNTAYLQMNSLRAEDTAVYYCARRH | |
| | CH2(LALA)-CH3 | YPGGFDYWGQGTLVTVSAASTELPPKVSVFVPPRDGFFGNPRKSELICEA | |
| | (knobs) | TGFSPRQIQVSWLREGKQVGSGVTTDQVQAEAKESGPTTYDVTSTLTIKE | |
| | | SDWLGQSMFTCRVDHRGLTFQQNASSMCDKTHTCPPCPAPEAAGGPSVFL | |
| | | FPPKPKDTLMISRTPEVTCVVVDVSHEDPEVKFNWYVDGVEVHNAKTKPR | |
| | | EEQYNSTYRVVSVLTVLHQDWLNGKEYKCKVSNKALPAPIEKTISKAKGQ | |
| | | PREPQVYTLPPSREEMTKNQVSLWCLVKGFYPSDIAVEWESNGQPENNYK | |
| | | TTPPVLDSDGSFFLYSKLTVDKSRWQQGNVFSCSVMHEALHNHYTQKSLS | |
| | | LSPGK | |
| | YW243 VK-linker- | DIQMTQSPSSLSASVGDRVTITCRASQDVSTAVAWYQQKPGKAPKLLIYS | 201 |
| | MH2p | ASFLYSGVPSRFSGSGSGTDFTLTISSLQPEDFATYYCQQYLYHPATFGQ | |
| | | GTKVEIKRTAELPPKVSVFVPPRDGFFGNPRKSKLICKATGFSPRQIQVS | |
| | | WLREGKQVGSGVTTKQVQAEAKESGPTTYKVTSTLTIKESDWLGQSMFTC | |
| | | RVDHRGLTFQQNASSMC | |
| | Cetuximab VH- | QVQLKQSGPGLVQPSQSLSITCTVSGFSLTNYGVHWVRQSPGKGLEWLGV | 202 |
| | linker-AB002 VH- | IWSGGNTDYNTPFTSRLSINKDNSKSQVFFKMNSLQSNDTAIYYCARALT | |
| | CH1-hinge- | YYDYEFAYWGQGTLVTVSAASTKGPSVFPLAPQVQLQQSGAELARPGASV | |
| | CH2(LALA)- | KMSCKASGYTFTRYTMHWVKQRPGQGLEWIGYINPSRGYTNYNQKFKDKA | |
| | CH3(holes) | TLTTDKSSSTAYMQLSSLTSEDSAVYYCARYYDDHYCLDYWGQGTTLTVS | |
| | | SASTKGPSVFPLAPSSKSTSGGTAALGCLVKDYFPEPVTVSWNSGALTSG | |
| | | VHTFPAVLQSSGLYSLSSVVTVPSSSLGTQTYICNVNHKPSNTKVDKKVE | |
| | | PKSCDKTHTCPPCPAPEAAGGPSVFLFPPKPKDTLMISRTPEVTCVVVDV | |
| | | SHEDPEVKFNWYVDGVEVHNAKTKPREEQYNSTYRVVSVLTVLHQDWLNG | |
| | | KEYKCKVSNKALPAPIEKTISKAKGQPREPQVYTLPPSREEMTKNQVSLS | |
| | | CAVKGFYPSDIAVEWESNGQPENNYKTTPPVLDSDGSFFLVSKLTVDKSR | |
| | | WQQGNVFSCSVMHEALHNHYTQKSLSLSPGK | |
| | Cetuximab VK- | DILLTQSPVILSVSPGERVSFSCRASQSIGTNIHWYQQRTNGSPRLLIKY | 203 |
| | linker-AB002 VK- | ASESISGIPSRFSGSGSGTDFTLSINSVESEDIADYYCQQNNNWPTTFGA | |
| | CK | GTKLELKRTVAAPSVFIFPPQIVLTQSPAIMSASPGEKVTMTCRASSSVS | |
| | | YMNWYQQKSGTSPKRWIYDTSKVASGVPYRFSGSGSGTSYSLTISSMEAE | |
| | | DAATYYCQQWSSNPLTFGSGTKLEINRTVAAPSVFIFPPSDEQLKSGTAS | |
| | | VVCLLNNFYPPEAKVQWKVDNALQSGNSQESVTEQDSKDSTYSLSSTLTL | |
| | | SKADYEKHKVYACEVTHQGLSSPVTKSFNRGEC | |
| TMH18 | YW243 VH-linker- | EVQLVESGGGLVQPGGSLRLSCAASGFTFSDSWIHWVRQAPGKGLEWVAW | 204 |
| | MH2p-hinge- | ISPYGGSTYYADSVKGRFTISADTSKNTAYLQMNSLRAEDTAVYYCARRH | |
| | CH2(LALA)-CH3 | YPGGFDYWGQGTLVTVSAASTELPPKVSVFVPPRDGFFGNPRKSKLICKA | |
| | (knobs) | TGFSPRQIQVSWLREGKQVGSGVTTKQVQAEAKESGPTTYKVTSTLTIKE | |
| | | SDWLGQSMFTCRVDHRGLTFQQNASSMCDKTHTCPPCPAPEAAGGPSVFL | |
| | | FPPKPKDTLMISRTPEVTCVVVDVSHEDPEVKFNWYVDGVEVHNAKTKPR | |
| | | EEQYNSTYRVVSVLTVLHQDWLNGKEYKCKVSNKALPAPIEKTISKAKGQ | |
| | | PREPQVYTLPPSREEMTKNQVSLWCLVKGFYPSDIAVEWESNGQPENNYK | |
| | | TTPPVLDSDGSFFLYSKLTVDKSRWQQGNVFSCSVMHEALHNHYTQKSLS | |
| | | LSPGK | |
| | YW243 VK-linker- | DIQMTQSPSSLSASVGDRVTITCRASQDVSTAVAWYQQKPGKAPKLLIYS | 205 |
| | MH2n | ASFLYSGVPSRFSGSGSGTDFTLTISSLQPEDFATYYCQQYLYHPATFGQ | |
| | | GTKVEIKRTAELPPKVSVFVPPRDGFFGNPRKSELICEATGFSPRQIQVS | |
| | | WLREGKQVGSGVTTDQVQAEAKESGPTTYDVTSTLTIKESDWLGQSMFTC | |
| | | RVDHRGLTFQQNASSMC | |
| | Cetuximab VH- | QVQLKQSGPGLVQPSQSLSITCTVSGFSLTNYGVHWVRQSPGKGLEWLGV | 206 |
| | linker-AB002 VH- | IWSGGNTDYNTPFTSRLSINKDNSKSQVFFKMNSLQSNDTAIYYCARALT | |
| | CH1-hinge- | YYDYEFAYWGQGTLVTVSAASTKGPSVFPLAPQVQLQQSGAELARPGASV | |
| | CH2(LALA)- | KMSCKASGYTFTRYTMHWVKQRPGQGLEWIGYINPSRGYTNYNQKFKDKA | |
| | CH3(holes) | TLTTDKSSSTAYMQLSSLTSEDSAVYYCARYYDDHYCLDYWGQGTTLTVS | |
| | | SASTKGPSVFPLAPSSKSTSGGTAALGCLVKDYFPEPVTVSWNSGALTSG | |
| | | VHTFPAVLQSSGLYSLSSVVTVPSSSLGTQTYICNVNHKPSNTKVDKKVE | |
| | | PKSCDKTHTCPPCPAPEAAGGPSVFLFPPKPKDTLMISRTPEVTCVVVDV | |
| | | SHEDPEVKFNWYVDGVEVHNAKTKPREEQYNSTYRVVSVLTVLHQDWLNG | |
| | | KEYKCKVSNKALPAPIEKTISKAKGQPREPQVYTLPPSREEMTKNQVSLS | |
| | | CAVKGFYPSDIAVEWESNGQPENNYKTTPPVLDSDGSFFLVSKLTVDKSR | |
| | | WQQGNVFSCSVMHEALHNHYTQKSLSLSPGK | |
| | Cetuximab VK- | DILLTQSPVILSVSPGERVSFSCRASQSIGTNIHWYQQRTNGSPRLLIKY | 207 |
| | linker-AB002 VK- | ASESISGIPSRFSGSGSGTDFTLSINSVESEDIADYYCQQNNNWPTTFGA | |
| | CK | GTKLELKRTVAAPSVFIFPPQIVLTQSPAIMSASPGEKVTMTCRASSSVS | |
| | | YMNWYQQKSGTSPKRWIYDTSKVASGVPYRFSGSGSGTSYSLTISSMEAE | |
| | | DAATYYCQQWSSNPLTFGSGTKLEINRTVAAPSVFIFPPSDEQLKSGTAS | |
| | | VVCLLNNFYPREAKVQWKVDNALQSGNSQESVTEQDSKDSTYSLSSTLTL | |
| | | SKADYEKHKVYACEVTHQGLSSPVTKSFNRGEC | |
| TMH19 | YW243 VH-linker- | EVQLVESGGGLVQPGGSLRLSCAASGFTFSDSWIHWVRQAPGKGLEWVAW | 208 |
| | MH2h-hinge- | ISPYGGSTYYADSVKGRFTISADTSKNTAYLQMNSLRAEDTAVYYCARRH | |
| | CH2(LALA)-CH3 | YPGGFDYWGQGTLVTVSAASTELPPKVSVFVPPRDGFFGNPRKSKLACSA | |
| | (knobs) | TGFSPRQIQVSWLREGKQVGSGVTTDQVQAEAKESGPTTYKVASTLTIKE | |
| | | SDWLGQSMFTCRVDHRGLTFQQNASSMCDKTHTCPPCPAPEAAGGPSVFL | |
| | | FPPKPKDTLMISRTPEVTCVVVDVSHEDPEVKFNWYVDGVEVHNAKTKPR | |
| | | EEQYNSTYRVVSVLTVLHQDWLNGKEYKCKVSNKALPAPIEKTISKAKGQ | |
| | | PREPQVYTLPPSREEMTKNQVSLWCLVKGFYPSDIAVEWESNGQPENNYK | |
| | | TTPPVLDSDGSFFLYSKLTVDKSRWQQGNVFSCSVMHEALHNHYTQKSLS | |
| | | LSPGK | |
| | YW243 VK-linker- | DIQMTQSPSSLSASVGDRVTITCRASQDVSTAVAWYQQKPGKAPKLLIYS | 209 |
| | MH2k | ASFLYSGVPSRFSGSGSGTDFTLTISSLQPEDFATYYCQQYLYHPATFGQ | |
| | | GTKVEIKRTAELPPKVSVFVPPRDGFFGNPRKSKLWCQATGFSPRQIQVS | |
| | | WLREGKQVGSGVTTDQVQAEAKESGPTTYKVTSTLTIKESDWLGQSMFTC | |
| | | RVDHRGLTFQQNASSMC | |
| | Cetuximab VH- | QVQLKQSGPGLVQPSQSLSITCTVSGFSLTNYGVHWVRQSPGKGLEWLGV | 210 |
| | linker-AB002 VH- | IWSGGNTDYNTPFTSRLSINKDNSKSQVFFKMNSLQSNDTAIYYCARALT | |
| | CH1-hinge- | YYDYEFAYWGQGTLVTVSAASTKGPSVFPLAPQVQLQQSGAELARPGASV | |
| | CH2(LALA)- | KMSCKASGYTFTRYTMHWVKQRPGQGLEWIGYINPSRGYTNYNQKFKDKA | |
| | CH3(holes) | TLTTDKSSSTAYMQLSSLTSEDSAVYYCARYYDDHYCLDYWGQGTTLTVS | |
| | | SASTKGPSVFPLAPSSKSTSGGTAALGCLVKDYFPEPVTVSWNSGALTSG | |
| | | VHTFPAVLQSSGLYSLSSVVTVPSSSLGTQTYICNVNHKPSNTKVDKKVE | |
| | | PKSCDKTHTCPPCPAPEAAGGPSVFLFPPKPKDTLMISRTPEVTCVVVDV | |
| | | SHEDPEVKFNWYVDGVEVHNAKTKPREEQYNSTYRVVSVLTVLHQDWLNG | |
| | | KEYKCKVSNKALPAPIEKTISKAKGQPREPQVYTLPPSREEMTKNQVSLS | |
| | | CAVKGFYPSDIAVEWESNGQPENNYKTTPPVLDSDGSFFLVSKLTVDKSR | |
| | | WQQGNVFSCSVMHEALHNHYTQKSLSLSPGK | |
| | Cetuximab VK- | DILLTQSPVILSVSPGERVSFSCRASQSIGTNIHWYQQRTNGSPRLLIKY | 211 |
| | linker-AB002 VK- | ASESISGIPSRFSGSGSGTDFTLSINSVESEDIADYYCQQNNNWPTTFGA | |
| | CK | GTKLELKRTVAAPSVFIFPPQIVLTQSPAIMSASPGEKVTMTCRASSSVS | |
| | | YMNNYQQKSGTSPKPWIYDTSKVASGVPYRFSGSGSGTSYELTISSMEAE | |
| | | DAATYYCQQWSSNPLTFGSGTKLEINRTVAAPSVFIFPPSDEQLKSGTAS | |
| | | VVCLLNNFYPREAKVQWKVDNALQSGNSQESVTEQDSKDSTYSLSSTLTL | |
| | | SKADYEKHKVYACEVTHQGLSSPVTKSFNRGEC | |
| TMH20 | YW243 VH-linker- | EVQLVESGGGLVQPGGSLRLSCAASGFTFSDSWIHWVRQAPGKGLEWVAW | 212 |
| | MH2k-hinge- | ISPYGGSTYYADSVKGRFTISADTSKNTAYLQMNSLRAEDTAVYYCARRH | |
| | CH2(LALA)- | YPGGFDYWGQGTLVTVSAASTELPPKVSVFVPPRDGFFGNPRKSKLWCQA | |
| | CH3(knobs) | TGFSPRQIQVSWLREGKQVGSGVTTDQVQAEAKESGPTTYKVTSTLTIKE | |
| | | SDWLGQSMFTCRVDHRGLTFQQNASSMCDKTHTCPPCPAPEPAGGPSVFL | |
| | | FPPKPKDTLMISRTPEVTCVVVDVSHEDPEVKFNWYVDGVEVHNAKTKPR | |
| | | EEQYNSTYRVVSVLTVLHQDWLNGKEYKCKVSNKALPAPIEKTISKAKGQ | |
| | | PREPQVYTLPPSREEMTKNQVSLWCLVKGFYPSDIAVEWESNGQPENNYK | |
| | | TTPPVLDSDGSFFLYSKLTVDKSRWQQGNVFSCSVMHEALHNHYTQKSLS | |
| | | LSPGK | |
| | YW243 VK-linker- | DIQMTQSPSSLSASVGDRVTITCRASQDVSTAVAWYQQKPGKAPKLLIYS | 213 |
| | MH2h | ASFLYSGVPSRFSGSGSGTDFTLTISSLQPEDFATYYCQQYLYHPATFGQ | |
| | | GTKVEIKRTAELPPKVSVFVPPRDGFFGNPRKSKLACSATGFSPRQIQVS | |
| | | WLREGKQVGSGVTTDQVQAEAKESGPTTYKVASTLTIKESDWLGQSMFTC | |
| | | RVDHRGLTFQQNASSMC | |
| | Cetuximab VH- | QVQLKQSGPGLVQPSQSLSITCTVSGFSLTNYGVHWVRQSPGKGLEWLGV | 214 |
| | linker-AB002 VH- | IWSGGNTDYNTPFTSRLSINKDNSKSQVFFKMNSLQSNDTAIYYCARALT | |
| | CH1-hinge- | YYDYEFAYWGQGTLVTVSAASTKGPSVFPLAPQVQLQQSGAELARPGASV | |
| | CH2(LALA)- | KMSCKASGYTFTRYTMHWVKQRPGQGLEWIGYINPSRGYTNYNQKFKDKA | |
| | CH3(holes) | TLTTDKSSSTAYMQLSSLTSEDSAVYYCARYYDDHYCLDYWGQGTTLTVS | |
| | | SASTKGPSVFPLAPSSKSTSGGTAALGCLVKDYFPEPVTVSWNSGALTSG | |
| | | VHTFPAVLQSSGLYSLSSVVTVPSSSLGTQTYICNVNHKPSNTKVDKKVE | |
| | | PKSCDKTHTCPPCPAPEAAGGPSVFLFPPKPKDTLMISRTPEVTCVVVDV | |
| | | SHEDPEVKFNWYVDGVEVHNAKTKPREEQYNSTYRVVSVLTVLHQDWLNG | |
| | | KEYKCKVSNKALPAPIEKTISKAKGQPREPQVYTLPPSREEMTKNQVSLS | |
| | | CAVKGFYPSDIAVEWESNGQPENNYKTTPPVLDSDGSFFLVSKLTVDKSR | |
| | | WQQGNVFSCSVMHEALHNHYTQKSLSLSPGK | |
| | Cetuximab VK- | DILLTQSPVILSVSPGERVSFSCRASQSIGTNIHWYQQRTNGSPRLLIKY | 215 |
| | linker-AB002 VK- | ASESISGIPSRFSGSGSGTDFTLSINSVESEDIADYYCQQNNNWPTTFGA | |
| | CK | GTKLELKRTVAAPSVFIFPPQIVLTQSPAIMSASPGEKVTMTCRASSSVS | |
| | | YMNWYQQKSGTSPKRWTYDTSKVASGVPYRFSGSGSGTSYSLTISSMEAE | |
| | | DAATYYCQQWSSNPLTFGSGTKLEINRTVAAPSVFIFPPSDEQLKSGTAS | |
| | | VVCLLNNFYPREAKVQWKVDNALQSGNSQESVTEQDSKDSTYSLSSTLTL | |
| | | SKADYEKHKVYACEVTHQGLSSPVTKSFNRGEC | |
| TMH21 | AB426 VH-linker- | QVQLVESGGGVVQPGRSLRLDCKASGITFSNSGMHWVRQAPGKGLEWVAV | 216 |
| | MH2-hinge- | IWYDGSKRYYADSVKGRFTISRDNSKNTLFLQMNSLRAEDTAVYYCATND | |
| | CH2(LALA)- | DYWGQGTLVTVSSASTELPPKVSVFVPPRDGFFGNPRKSKLICQATGFSP | |
| | CH3(knobs) | RQIQVSWLREGKQVGSGVTTDQVQAEAKESGPTTYKVTSTLTIKESDWLG | |
| | | QSMFTCRVDHRGLTFQQNASSMCDKTHTCPPCPAPEAAGGPSVFLFPPKP | |
| | | KDTLMISRTPEVTCVVVDVSHEDPEVKFNWYVDGVEVHNAKTKPREEQYN | |
| | | STYRVVSVLTVLHQDWLNGKEYKCKVSNKALPAPIEKTISKAKGQPREPQ | |
| | | VYTLPPSREEMTKNQVSLWCLVKGFYPSDIAVEWESNGQPENNYKTTPPV | |
| | | LDSDGSFFLYSKLTVDKSRWQQGNVFSCSVMHEALHNHYTQKSLSLSPGK | |
| | AB426 VK-linker- | EIVLTQSPATLSLSPGERATLSCRASQSVSSYLAWYQQKPGQAPRLLIYD | 217 |
| | MH2 | ASNRATGIPARFSGSGSGTDFTLTISSLEPEDFAVYYCQQSSNWPRTFGQ | |
| | | GTKVEIKRTAELPPKVSVFVPPRDGFFGNPRKSKLICQATGFSPRQIQVS | |
| | | WLREGKQVGSGVTTDQVQAEAKESGPTTYKVTSTLTIKESDWLGQSMFTC | |
| | | RVDHRGLTFQQNASSMC | |
| | Cetuximab VH- | QVQLKQSGPGLVQPSQSLSITCTVSGFSLTNYGVHWVRQSPGKGLEWLGV | 218 |
| | linker-AB002 VH- | IWSGGNTDYNTPFTSRLSINKDNSKSQVFFKMNSLQSNDTAIYYCARALT | |
| | CH1-hinge- | YYDYEFAYWGQGTLVTVSAASTKGPSVFPLAPQVQLQQSGAELARPGASV | |
| | CH2(LALA)- | KMSCKASGYTFTRYTMHWVKQRPGQGLEWIGYINPSRGYTNYNQKFKDKA | |
| | CH3(holes) | TLTTDKSSSTAYMQLSSLTSEDSAVYYCARYYDDHYCLDYWGQGTTLTVS | |
| | | SASTKGPSVFPLAPSSKSTSGGTAALGCLVKDYFPEPVTVSWNSGALTSG | |
| | | VHTFPAVLQSSGLYSLSSVVTVPSSSLGTQTYICNVNHKPSNTKVDKKVE | |
| | | PKSCDKTHTCPPCPAPEAAGGPSVFLFPPKPKDTLMISRTPEVTCVVVDV | |
| | | SHEDPEVKFNWYVDGVEVHNAKTKPREEQYNSTYRVVSVLTVLHQDWLNG | |
| | | KEYKCKVSNKALPAPIEKTISKAKGQPREPQVYTLPPSREEMTKNQVSLS | |
| | | CAVKGFYPSDIAVEWESNGQPENNYKTTPPVLDSDGSFFLVSKLTVDKSR | |
| | | WQQGNVFSCSVMHEALHNHYTQKSLSLSPGK | |
| | Cetuximab VK- | DILLTQSPVILSVSPGERVSFSCRASQSIGTNIHWYQQRTNGSPRLLIKY | 219 |
| | linker-AB002 VK- | ASESISGIPSRFSGSGSGTDFTLSINSVESEDIADYYCQQNNNWPTTFGA | |
| | CK | GTKLELKRTVAAPSVFIFPPQIVLTQSPAIMSASPGEKVTMTCRASSSVS | |
| | | YMNWYQQKSGTSPKRWIYDTSKVASGVPYRFSGSGSGTSYSLTISSMEAE | |
| | | DAATYYCQQWSSNPLTFGSGTKLEINRTVAAPSVFIFPPSDEQLKSGTAS | |
| | | VVCLLNNFYPREAKVQWKVDNALQSGNSQESVTEQDSKDSTYSLSSTLTL | |
| | | SKADYEKHKVYACEVTHQGLSSPVTKSFNRGEC | |
| TMH22 | AB426 VH-linker- | QVQLVESGGGVVQPGRSLRLDCKASGITFSNSGMHWVRQAPGKGLEWVAV | 220 |
| | MH2n-hinge- | IWYDGSKRYYADSVKGRFTISRDNSKNTLFLQMNSLRAEDTAVYYCATND | |
| | CH2(LALA)- | DYWGQGTLVTVSSASTELPPKVSVFVPPRDGFFGNPRKSELICEATGFSP | |
| | CH3(knobs) | RQIQVSWLREGKQVGSGVTTDQVQAEAKESGPTTYDVTSTLTIKESDWLG | |
| | | QSMFTCRVDHRGLTFQQNASSMCDKTHTCPPCPAPEAAGGPSVFLFPPKP | |
| | | KDTLMISRTPEVTCVVVDVSHEDPEVKFNWYVDGVEVHNAKTKPREEQYN | |
| | | STYRVVSVLTVLHQDWLNGKEYKCKVSNKALPAPIEKTISKAKGQPREPQ | |
| | | VYTLPPSREEMTKNQVSLWCLVKGFYPSDIAVEWESNGQPENNYKTTPPV | |
| | | LDSDGSFFLYSKLTVDKSRWQQGNVFSCSVMHEALHNHYTQKSLSLSPGK | |
| | AB426 VK-linker- | EIVLTQSPATLSLSPGERATLSCRASQSVSSYLAWYQQKPGQAPRLLIYD | 221 |
| | MH2p | ASNRATGIPARFSGSGSGTDFTLTISSLEPEDFAVYYCQQSSNWPRTFGQ | |
| | | GTKVEIKRTAELPPKVSVFVPPRDGFFGNPRKSKLICKATGFSPRQIQVS | |
| | | WLREGKQVGSGVTTKQVQAEAKESGPTTYKVTSTLTIKESDWLGQSMFTC | |
| | | RVDHRGLTFQQNASSMC | |
| | Cetuximab VH- | QVQLKQSGPGLVQPSQSLSITCTVSGFSLTNYGVHWVRQSPGKGLEWLGV | 222 |
| | linker-AB002 VH- | IWSGGNTDYNTPFTSRLSINKDNSKSQVFFKMNSLQSNDTAIYYCARALT | |
| | CH1-hinge- | YYDYEFAYWGQGTLVTVSAASTKGPSVFPLAPQVQLQQSGAELARPGASV | |
| | CH2(LALA)- | KMSCKASGYTFTRYTMHWVKQRPGQGLEWIGYINPSRGYTNYNQKFKDKA | |
| | CH3(holes) | TLTTDKSSSTAYMQLSSLTSEDSAVYYCARYYDDHYCLDYWGQGTTLTVS | |
| | | SASTKGPSVFPLAPSSKSTSGGTAALGCLVKDYFPEPVTVSWNSGALTSG | |
| | | VHTFPAVLQSSGLYSLSSVVTVPSSSLGTQTYICNVNHKPSNTKVDKKVE | |
| | | PKSCDKTHTCPPCPAPEAAGGPSVFLFPPKPKDTLMISRTPEVTCVVVDV | |
| | | SHEDPEVKFNWYVDGVEVHNAKTKPREEQYNSTYRVVSVLTVLHQDWLNG | |
| | | KEYKCKVSNKALPAPIEKTISKAKGQPREPQVYTLPPSREEMTKNQVSLS | |
| | | CAVKGFYPSDIAVEWESNGQPENNYKTTPPVLDSDGSFFLVSKLTVDKSR | |
| | | WQQGNVFSCSVMHEALHNHYTQKSLSLSPGK | |
| | Cetuximab VK- | DILLTQSPVILSVSPGERVSFSCRASQSIGTNIHWYQQRTNGSPRLLIKY | 223 |
| | linker-AB002 VK- | ASESISGIPSRFSGSGSGTDFTLSINSVESEDIADYYCQQNNNWPTTFGA | |
| | CK | GTKLELKRTVAAPSVFIFPPQIVLTQSPAIMSASPGEKVTMTCRASSSVS | |
| | | YMNWYQQKSGTSPKRWIYDTSKVASGVPYRFSGSGSGTSYSLTISSMEAE | |
| | | DAATYYCQQWSSNPLTFGSGTKLEINRTVAAPSVFIFPPSDEQLKSGTAS | |
| | | VVCLLNNFYPREAKVQWKVDNALQSGNSQESVTEQDSKDSTYSLSSTLTL | |
| | | SKADYEKHKVYACEVTHQGLSSPVTKSFNRGEC | |
| TMH23 | AB426 VH-linker- | QVQLVESGGGVVQPGRSLRLDCKASGITFSNSGMHWVRQAPGKGLEWVAV | 224 |
| | MH2p-hinge- | IWYDGSKRYYADSVKGRFTISRDNSKNTLFLQMNSLRAEDTAVYYCATND | |
| | CH2(LALA)- | DYWGQGTLVTVSSASTELPPKVSVFVPPRDGFFGNPRKSKLICKATGFSP | |
| | CH3(knobs) | RQIQVSWLREGKQVGSGVTTKQVQAEAKESGPTTYKVTSTLTIKESDWLG | |
| | | QSMFTCRVDHRGLTFQQNASSMCDKTHTCPPCPAPEAAGGPSVFLFPPKP | |
| | | KDTLMISRTPEVTCVVVDVSHEDPEVKFNWYVDGVEVHNAKTKPREEQYN | |
| | | STYRVVSVLTVLHQDWLNGKEYKCKVSNKALPAPIEKTISKAKGQPREPQ | |
| | | VYTLPPSREEMTKNQVSLWCLVKGFYPSDIAVEWESNGQPENNYKTTPPV | |
| | | LDSDGSFFLYSKLTVDKSRWQQGNVFSCSVMHEALHNHYTQKSLSLSPGK | |
| | AB426 VK-linker- | EIVLTQSPATLSLSPGERATLSCRASQSVSSYLAWYQQKPGQAPRLLIYD | 225 |
| | MH2n | ASNRATGIPARFSGSGSGTDFTLTISSLEPEDFAVYYCQQSSNWPRTFGQ | |
| | | GTKVEIKRTAELPPKVSVFVPPRDGFFGNPRKSELICEATGFSPRQIQVS | |
| | | WLREGKQVGSGVTTDQVQAEAKESGPTTYDVTSTLTIKESDWLGQSMFTC | |
| | | RVDHRGLTFQQNASSMC | |
| | Cetuximab VH- | QVQLKQSGPGLVQPSQSLSITCTVSGFSLTNYGVHWVRQSPGKGLEWLGV | 226 |
| | linker-AB002 VH- | IWSGGNTDYNTPFTSRLSINKDNSKSQVFFKMNSLQSNDTAIYYCARALT | |
| | CH1-hinge- | YYDYEFAYWGQGTLVTVSAASTKGPSVFPLAPQVQLQQSGAELARPGASV | |
| | CH2(LALA)- | KMSCKASGYTFTRYTMHWVKQRPGQGLEWIGYINPSRGYTNYNQKFKDKA | |
| | CH3(holes) | TLTTDKSSSTAYMQLSSLTSEDSAVYYCARYYDDHYCLDYWGQGTTLTVS | |
| | | SASTKGPSVFPLAPSSKSTSGGTAALGCLVKDYFPEPVTVSWNSGALTSG | |
| | | VHTFPAVLQSSGLYSLSSVVTVPSSSLGTQTYICNVNHKPSNTKVDKKVE | |
| | | PKSCDKTHTCPPCPAPEAAGGPSVFLFPPKPKDTLMISRTPEVTCVVVDV | |
| | | SHEDPEVKFNWYVDGVEVHNAKTKPREEQYNSTYRVVSVLTVLHQDWLNG | |
| | | KEYKCKVSNKALPAPIEKTISKAKGQPREPQVYTLPPSREEMTKNQVSLS | |
| | | CAVKGFYPSDIAVEWESNGQPENNYKTTPPVLDSDGSFFLVSKLTVDKSR | |
| | | WQQGNVFSCSVMHEALHNHYTQKSLSLSPGK | |
| | Cetuximab VK- | DILLTQSPVILSVSPGERVSFSCRASQSIGTNIHWYQQRTNGSPRLLIKY | 227 |
| | linker-AB002 VK- | ASESISGIPSRFSGSGSGTDFTLSINSVESEDIADYYCQQNNNQPTTFGA | |
| | CK | GTKLELKRTVAAPSVFIFPPQIVLTQSPAIMSASPGEKVTMTCRASSSVS | |
| | | YMNWYQQKSGTSPKRWIYDTSKVASGVPYRFSGSGSGTSYSLTISSMEAE | |
| | | DAATYYCQQWSSNPLTFGSGTKLEINRTVAAPSVFIFPPSDEQLKSGTAS | |
| | | VVCLLNNFYPREAKVQWKVDNALQSGNSQESVTEQDSKDSTYSLSSTLTL | |
| | | SKADYEKHKVYACEVTHQGLSSPVTKSFNRGEC | |
| TMH24 | AB426 VH-linker- | QVQLVESGGGVVQPGRSLRLDCKASGITFSNSGMHWVRQAPGKGLEWVAV | 228 |
| | MH2h-hinge- | IWYDGSKRYYADSVKGRFTISRDNSKNTLFLQMNSLRAEDTAVYYCATND | |
| | CH2(LALA)- | DYWGQGTLVTVSSASTELPPKVSVFVPPRDGFFGNPRKSKLACSATGFSP | |
| | CH3(knobs) | RQIQVSWLREGKQVGSGVTTDQVQAEAKESGPTTYKVASTLTIKESDWLG | |
| | | QSMFTCRVDHRGLTFQQNASSMCDKTHTCPPCPAPEAAGGPSVFLFPPKP | |
| | | KDTLMISRTPEVTCVVVDVSHEDPEVKFNWYVDGVEVHNAKTKPREEQYN | |
| | | STYRVVSVLTVLHQDWLNGKEYKCKVSNKALPAPIEKTISKAKGQPREPQ | |
| | | VYTLPPSREEMTKNQVSLWCLVKGFYPSDIAVEWESNGQPENNYKTTPPV | |
| | | LDSDGSFFLYSKLTVDKSRWQQGNVFSCSVMHEALHNHYTQKSLSLSPGK | |
| | AB426 VK-linker- | EIVLTQSPATLSLSPGERATLSCRASQSVSSYLAWYQQKPGQAPRLLIYD | 229 |
| | MH2k | ASNRATGIPARFSGSGSGTDFTLTISSLEPEDFAVYYCQQSSNWPRTFGQ | |
| | | GTKVEIKRTAELPPKVSVFVPPRDGFFGNPRKSKLWCQATGFSPRQIQVS | |
| | | WLREGKQVGSGVTTDQVQAEAKESGPTTYKVTSTLTIKESDWLGQSMFTC | |
| | | RVDHRGLTFQQNASSMC | |
| | Cetuximab VH- | QVQLKQSGPGLVQPSQSLSITCTVSGFSLTNYGVHWVRQSPGKGLEWLGV | 230 |
| | linker-AB002 VH- | IWSGGNTDYNTPFTSRLSINKDNSKSQVFFKMNSLQSNDTAIYYCARALT | |
| | CH1-hinge- | YYDYEFAYWGQGTLVTVSAASTKGPSVFPLAPQVQLQQSGAELARPGASV | |
| | CH2(LALA)- | KMSCKASGYTFTRYTMHWVKQRPGQGLEWIGYINPSRGYTNYNQKFKDKA | |
| | CH3(holes) | TLTTDKSSSTAYMQLSSLTSEDSAVYYCARYYDDHYCLDYWGQGTTLTVS | |
| | | SASTKGPSVFPLAPSSKSTSGGTAALGCLVKDYFPEPVTVSWNSGALTSG | |
| | | VHTFPAVLQSSGLYSLSSVVTVPSSSLGTQTYICNVNHKPSNTKVDKKVE | |
| | | PKSCDKTHTCPPCPAPEAAGGPSVFLFPPKPKDTLMISRTPEVTCVVVDV | |
| | | SHEDPEVKFNWYVDGVEVHNAKTKPREEQYNSTYRVVSVLTVLHQDWLNG | |
| | | KEYKCKVSNKALPAPIEKTISKAKGQPREPQVYTLPPSREEMTKNQVSLS | |
| | | CAVKGFYPSDIAVEWESNGQPENNYKTTPPVLDSDGSFFLVSKLTVDKSR | |
| | | WQQGNVFSCSVMHEALHNHYTQKSLSLSPGK | |
| | Cetuximab VK- | DILLTQSPVILSVSPGERVSFSCRASQSIGTNIHWYQQRTNGSPRLLIKY | 231 |
| | linker-AB002 VK- | ASESISGIPSRFSGSGSGTDFTLSINSVESEDIADYYCQQNNNWPTTFGA | |
| | CK | GTKLELKRTVAAPSVFIFPPQIVLTQSPAIMSASPGEKVTMTCRASSSVS | |
| | | YMNWYQQKSGTSPKRWIYDTSKVASGVPYRFSGSGSGTSYSLTISSMEAE | |
| | | DAATYYCQQWSSNPLTFGSGTKLEINRTVAAPSVFIFPPSDEQLKSGTAS | |
| | | VVCLLNNFYPREAKVQWKVDNALQSGNSQESVTEQDSKDSTYSLSSTLTL | |
| | | SKADYEKHKVYACEVTHQGLSSPVTKSFNRGEC | |
| TMH25 | AB426 VH-linker- | QVQLVESGGGVVQPGRSLRLDCKASGITFSNSGMHWVRQAPGKGLEWVAV | 232 |
| | MH2k-hinge- | IWYDGSKRYYADSVKGRFTISRDNSKNTLFLQMNSLRAEDTAVYYCATND | |
| | CH2(LALA)- | DYWGQGTLVTVSSASTELPPKVSVFVPPRDGFFGNPRKSKLWCQATGFSP | |
| | CH3(knobs) | RQIQVSWLREGKQVGSGVTTDQVQAEAKESGPTTYKVTSTLTIKESDWLG | |
| | | QSMFTCRVDHRGLTFQQNASSMCDKTHTCPPCPAPEAAGGPSVFLFPPKP | |
| | | KDTLMISRTPEVTCVVVDVSHEDPEVKFNWYVDGVEVHNAKTKPREEQYN | |
| | | STYRVVSVLTVLHQDWLNGKEYKCKVSNKALPAPIEKTISKAKGQPREPQ | |
| | | VYTLPPSREEMTKNQVSLWCLVKGFYPSDIAVEWESNGQPENNYKTTPPV | |
| | | LDSDGSFFLYSKLTVDKSRWQQGNVFSCSVMHEALHNHYTQKSLSLSPGK | |
| | AB426 VK-linker- | EIVLTQSPATLSLSPGERATLSCRASQSVSSYLAWYQQKPGQAPRLLIYD | 233 |
| | MH2h | ASNRATGIPARFSGSGSGTDFTLTISSLEPEDFAVYYCQQSSNWPRTFGQ | |
| | | GTKVEIKRTAELPPKVSVFVPPRDGFFGNPRKSKLACSATGFSPRQIQVS | |
| | | WLREGKQVGSGVTTDQVQAEAKESGPTTYKVASTLTIKESDWLGQSMFTC | |
| | | RVDHRGLTFQQNASSMC | |
| | Cetuximab VH- | QVQLKQSGPGLVQPSQSLSITCTVSGFSLTNYGVHWVRQSPGKGLEWLGV | 234 |
| | linker-AB002 VH- | IWSGGNTDYNTPFTSRLSINKDNSKSQVFFKMNSLQSNDTAIYYCARALT | |
| | CH1-hinge- | YYDYEFAYWGQGTLVTVSAASTKGPSVFPLAPQVQLQQSGAELARPGASV | |
| | CH2(LALA)- | KMSCKASGYTFTRYTMHWVKQRPGQGLEWIGYINPSRGYTNYNQKFKDKA | |
| | CH3(holes) | TLTTDKSSSTAYMQLSSLTSEDSAVYYCARYYDDHYCLDYWGQGTTLTVS | |
| | | SASTKGPSVFPLAPSSKSTSGGTAALGCLVKDYFPEPVTVSWNSGALTSG | |
| | | VHTFPAVLQSSGLYSLSSVVTVPSSSLGTQTYICNVNHKPSNTKVDKKVE | |
| | | PKSCDKTHTCPPCPAPEAAGGPSVFLFPPKPKDTLMISRTPEVTCVVVDV | |
| | | SHEDPEVKFNWYVDGVEVHNAKTKPREEQYNSTYRVVSVLTVLHQDWLNG | |
| | | KEYKCKVSNKALPAPIEKTISKAKGQPREPQVYTLPPSREEMTKNQVSLS | |
| | | CAVKGFYPSDIAVEWESNGQPENNYKTTPPVLDSDGSFFLVSKLTVDKSR | |
| | | WQQGNVFSCSVMHEALHNHYTQKSLSLSPGK | |
| | Cetuximab VK- | DILLTQSPVILSVSPGERVSFSCRASQSIGTNIHWYQQRTNGSPRLLIKY | 235 |
| | linker-AB002 VK- | ASESISGIPSRFSGSGSGTDFTLSINSVESEDIADYYCQQNNNWPTTFGA | |
| | CK | GTKLELKRTVAAPSVFIFPPQIVLTQSPAIMSASPGEKVTMTCRASSSVS | |
| | | YMNWYQQKSGTSPKRWIYDTSKVASGVPYRFSGSGSGTSYSLTISSMEAE | |
| | | DAATYYCQQWSSNPLTFGSGTKLEINRTVAAPSVFIFPPSDEQLKSGTAS | |
| | | VVCLLNNFYPREAKVQWKVDNALQSGNSQESVTEQDSKDSTYSLSSTLTL | |
| | | SKADYEKHKVYACEVTHQGLSSPVTKSFNRGEC | |
| KIH4 | AB426 VH-CH1- | QVQLVESGGGVVQPGRSLRLDCKASGITFSNSGMHWVRQAPGKGLEWVAV | 236 |
| | hinge-CH2(LALA)- | IWYDGSKRYYADSVKGRFTISRDNSKNTLFLQMNSLRAEDTAVYYCATND | |
| | CH3(knobs) | DYWGQGTLVTVSSASTKGPSVFPLAPSSKSTSGGTAALGCLVKDYFPEPV | |
| | | TVSWNSGALTSGVHTFPAVLQSSGLYSLSSVVTVPSSSLGTQTYICNVNH | |
| | | KPSNTKVDKKVEPKSCDKTHTCPPCPAPEAAGGPSVFLFPPKPKDTLMIS | |
| | | RTPEVTCVVVDVSHEDPEVKFNWYVDGVEVHNAKTKPREEQYNSTYRVVS | |
| | | VLTVLHQDWLNGKEYKCKVSNKALPAPIEKTISKAKGQPREPQVYTLPPS | |
| | | REEMTKNQVSLWCLVKGFYPSDIAVEWESNGQPENNYKTTPPVLDSDGSF | |
| | | FLYSKLTVDKSRWQQGNVFSCSVMHEALHNHYTQKSLSLSPGK | |
| | AB426 VL-CK | EIVLTQSPATLSLSPGERATLSCRASQSVSSYLAWYQQKPGQAPRLLIYD | 237 |
| | | ASNRATGIPARFSGSGSGTDFTLTISSLEPEDFAVYYCQQSSNWPRTFGQ | |
| | | GTKVEIKRTVAAPSVFIFPPSDEQLKSGTASVVCLLNNFYPREAKVQWKV | |
| | | DNALQSGNSQESVTEQDSKDSTYSLSSTLTLSKADYEKHKVYACEVTHQG | |
| | | LSSPVTKSFNRGEC | |
| | Cetuximab.2 VH- | QVQLKQSGPGLVQPSQSLSITCTVSGFSLTNYGVHWVRQSPGKGLEWLGV | 238 |
| | linker-AB002.2 | IWSGGNTDYNTPFTSRLSINKDNSKSQVFFKMNSLQSEDTAIYYCARALT | |
| | VH-CH1-hinge- | YYDYEFAYWGQGTLVTVSAASTKGPSVFPLAPQVQLQQSGAELARPGASV | |
| | CH2(LALA)- | KMSCKASGYTFTRYTMHWVKQRPGQGLEWIGYINPSRGYTNYNQKFKDKA | |
| | CH3(holes) | TLTTDKSSSTAYMQLSSLTSEDSAVYYCARYYDDHYSLDYWGQGTTLTVS | |
| | | SASTKGPSVFPLAPSSKSTSGGTAALGCLVKDYFPEPVTVSWNSGALTSG | |
| | | VHTFPAVLQSSGLYSLSSVVTVPSSSLGTQTYICNVNHKPSNTKVDKKVE | |
| | | PKSCDKTHTCPPCPAPEAAGGPSVFLFPPKPKDTLMISRTPEVTCVVVDV | |
| | | SHEDPEVKFNWYVDGVEVHNAKTKPREEQYNSTYRVVSVLTVLHQDWLNG | |
| | | KEYKCKVSNKALPAPIEKTISKAKGQPREPQVYTLPPSREEMTKNQVSLS | |
| | | CAVKGFYPSDIAVEWESNGQPENNYKTTPPVLDSDGSFFLVSKLTVDKSR | |
| | | WQQGNVFSCSVMHEALHNHYTQKSLSLSPGK | |
| | Cetuximab.2 VK- | DILLTQSPVILSVSPGERVSFSCRASQSIGTNIHWYQQRTSGSPRLLIKY | 239 |
| | linker-AB002.2 | ASESISGIPSRFSGSGSGTDFTLSINSVESEDIADYYCQQNNNWPTTFGA | |
| | VK-CK | GTKLELKRTVAAPSVFIFPPQIVLTQSPAIMSASPGEKVTMTCRASSSVS | |
| | | YMNWYQQKSGTSPKRWIYDTSKVASGVPYRFSGSGSGTSYSLTISSMEAE | |
| | | DAATYYCQQWSSNPLTFGSGTKLEIKRTVAAPSVFIFPPSDEQLKSGTAS | |
| | | VVCLLNNFYPREAKVQWKVDNALQSGNSQESVTEQDSKDSTYSLSSTLTL | |
| | | SKADYEKHKVYACEVTHQGLSSPVTKSFNRGEC | |
| KIH5 | YW243 VH-CH1- | EVQLVESGGGLVQPGGSLRLSCAASGFTFSDSWIHWVRQAPGKGLEWVAW | 240 |
| | hinge-CH2(LALA)- | ISPYGGSTYYADSVKGRFTISADTSKNTAYLQMNSLRAEDTAVYYCARRH | |
| | CH3 (knobs) | YPGGFDYWGQGTLVTVSAASTKGPSVFPLAPSSKSTSGGTAALGCLVKDY | |
| | | FPEPVTVSWNSGALTSGVHTFPAVLQSSGLYSLSSVVTVPSSSLGTQTYI | |
| | | CNVNHKPSNTKVDKKVEPKSCDKTHTCPPCPAPEAAGGPSVFLFPPKPKD | |
| | | TIMISRTPEVTCVVDVSHEDPEVKFNWYVDGVEVHNAKTKPREEQYNST | |
| | | YRVVSVLTVLHQDWLNGKEYKCKVSNKALPAPIEKTISKAKGQPREPQVY | |
| | | TLPPSREEMTKNQVSLWCLVKGFYPSDIAVEWESNGQPENNYKTTPPVLD | |
| | | SDGSFFLYSKLTVDKSRWQQGNVFSCSVMHEALHNHYTQKSLSLSPGK | |
| | YW243 VK-CK | DIQMTQSPSSLSASVGDRVTITCRASQDVSTAVAWYQQKPGKAPKLLIYS | 241 |
| | | ASFLYSGVPSRFSGSGSGTDFTLTISSLQPEDFATYYCQQYLYHPATFGQ | |
| | | GTKVEIKRTVAAPSVFIFPPSDEQLKSGTASVVCLLNNFYPREAKVQWKV | |
| | | DNALQSGNSQESVTEQDSKDSTYSLSSTLTLSKADYEKHKVYACEVTHQG | |
| | | LSSPVTKSFNRGEC | |
| | Cetuximab.2 VH- | QVQLKQSGPGLVQPSQSLSITCTVSGFSLTNYGVHWVRQSPGKGLEWLGV | 242 |
| | linker-AB002.2 | IWSGGNTDYNTPFTSRLSINKDNSKSQVFFKMNSLQSEDTAIYYCARALT | |
| | VH-CH1-hinge- | YYDYEFAYWGQGTLVTVSAASTKGPSVFPLAPQVQLQQSGAELARPGASV | |
| | CH2(LALA)- | KMSCKASGYTFTRYTMHWVKQRPGQGLEWIGYINPSRGYTNYNQKFKDKA | |
| | CH3(holes) | TLTTDKSSSTAYMQLSSLTSEDSAVYYCARYYDDHYSLDYWGQGTTLTVS | |
| | | SASTKGPSVFPLAPSSKSTSGGTAALGCLVKDYFPEPVTVSWNSGALTSG | |
| | | VHTFPAVLQSSGLYSLSSVVTVPSSSLGTQTYICNVNHKPSNTKVDKKVE | |
| | | PKSCDKTHTCPPCPAPEAAGGPSVFLFPPKPKDTLMISRTPEVTCVVVDV | |
| | | SHEDPEVKFNWYVDGVEVHNAKTKPREEQYNSTYRVVSVLTVLHQDWLNG | |
| | | KEYKCKVSNKALPAPIEKTISKAKGQPREPQVYTLPPSREEMTKNQVSLS | |
| | | CAVKGFYPSDIAVEWESNGQPENNYKTTPPVLDSDGSFFLVSKLTVDKSR | |
| | | WQQGNVFSCSVMHEALHNHYTQKSLSLSPGK | |
| | Cetuximab.2 VK- | DILLTQSPVILSVSPGERVSFSCRASQSIGTNIHWYQQRTSGSPRLLIKY | 243 |
| | linker-AB002.2 | ASESISGIPSRFSGSGSGTDFTLSINSVESEDIADYYCQQNNNWPTTFGA | |
| | VK-CK | GTKLELKRTVAAPSVFIFPPQIVLTQSPAIMSASPGEKVTMTCRASSSVS | |
| | | YMNWYQQKSGTSPKRWIYDTSKVASGVPYRFSGSGSGTSYSLTISSMEAE | |
| | | DAATYYCQQWSSNPLTFGSGTKLEIKRTVAAPSVFIFPPSDEQLKSGTAS | |
| | | VVCLLNNFYPREAKVQWKVDNALQSGNSQESVTEQDSKDSTYSLSSTLTL | |
| | | SKADYEKHKVYACEVTHQGLSSPVTKSFNRGEC | |
| KIH6 | YW243 VH-CH1- | EVQLVESGGGLVQPGGSLRLSCAASGFTFSDSWIHWVRQAPGKGLEWVAW | 244 |
| | hinge-CH2(LALA)- | ISPYGGSTYYADSVKGRFTISADTSKNTAYLQMNSLRAEDTAVYYCARRH | |
| | CH3 (knobs) | YPGGFDYWGQGTLVTVSAASTKGPSVFPLAPSSKSTSGGTAALGCLVKDY | |
| | | FPEPVTVSWNSGALTSGVHTFPAVLQSSGLYSLSSVVTVPSSSLGTQTYI | |
| | | CNVNHKPSNTKVDKKVEPKSCDKTHTCPPCPAPEAAGGPSVFLFPPKPKD | |
| | | TIMISRTPEVTCVVDVSHEDPEVKFNWYVDGVEVHNAKTKPREEQYNST | |
| | | YRVVSVLTVLHQDWLNGKEYKCKVSNKALPAPIEKTISKAKGQPREPQVY | |
| | | TLPPSREEMTKNQVSLWCLVKGFYPSDIAVEWESNGQPENNYKTTPPVLD | |
| | | SDGSFFLYSKLTVDKSRWQQGNVFSCSVMHEALHNHYTQKSLSLSPGK | |
| | YW243 VK-CK | DIQMTQSPSSLSASVGDRVTITCRASQDVSTAVAWYQQKPGKAPKLLIYS | 245 |
| | | ASFLYSGVPSRFSGSGSGTDFTLTISSLQPEDFATYYCQQYLYHPATFGQ | |
| | | GTKVEIKRTVAAPSVFIFPPSDEQLKSGTASVVCLLNNFYPREAKVQWKV | |
| | | DNALQSGNSQESVTEQDSKDSTYSLSSTLTLSKADYEKHKVYACEVTHQG | |
| | | LSSPVTKSFNRGEC | |
| | Cetuximab VH- | QVQLKQSGPGLVQPSQSLSITCTVSGFSLTNYGVHWVRQSPGKGLEWLGV | 246 |
| | linker-AB002 VH- | IWSGGNTDYNTPFTSRLSINKDNSKSQVFFKMNSLQSNDTAIYYCARALT | |
| | CH1-hinge- | YYDYEFAYWGQGTLVTVSAASTKGPSVFPLAPQVQLQQSGAELARPGASV | |
| | CH2(LALA)- | KMSCKASGYTFTRYTMHWVKQRPGQGLEWIGYINPSRGYTNYNQKFKDKA | |
| | CH3(holes) | TLTTDKSSSTAYMQLSSLTSEDSAVYYCARYYDDHYCLDYWGQGTTLTVS | |
| | | SASTKGPSVFPLAPSSKSTSGGTAALGCLVKDYFPEPVTVSWNSGALTSG | |
| | | VHTFPAVLQSSGLYSLSSVVTVPSSSLGTQTYICNVNHKPSNTKVDKKVE | |
| | | PKSCDKTHTCPPCPAPEAAGGPSVFLFPPKPKDTLMISRTPEVTCVVVDV | |
| | | SHEDPEVKFNWYVDGVEVHNAKTKPREEQYNSTYRVVSVLTVLHQDWLNG | |
| | | KEYKCKVSNKALPAPIEKTISKAKGQPREPQVYTLPPSREEMTKNQVSLS | |
| | | CAVKGFYPSDIAVEWESNGQPENNYKTTPPVLDSDGSFFLVSKLTVDKSR | |
| | | WQQGNVFSCSVMHEALHNHYTQKSLSLSPGK | |
| | Cetuximab VK- | DILLTQSPVILSVSPGERVSFSCRASQSIGTNIHWYQQRTNGSPRLLIKY | 247 |
| | linker-AB002 VK- | ASESISGIPSRFSGSGSGTDFTLSINSVESEDIADYYCQQNNNWPTTFGA | |
| | CK | GTKLELKRTVAAPSVFIFPPQIVLTQSPAIMSASPGEKVTMTCRASSSVS | |
| | | YMNWYQQKSGTSPKRWIYDTSKVASGVPYRFSGSGSGTSYSLTISSMEAE | |
| | | DAATYYCQQWSSNPLTFGSGTKLEINRTVAAPSVFIFPPSDEQLKSGTAS | |
| | | VVCLLNNFYPREAKVQWKVDNALQSGNSQESVTEQDSKDSTYSLSSTLTL | |
| | | SKADYEKHKVYACEVTHQGLSSPVTKSFNRGEC | |
| KIH7 | AB426 VH-CH1- | QVQLVESGGGVVQPGRSLRLDCKASGITFSNSGMHWVRQAPGKGLEWVAV | 248 |
| | hinge-CH2(LALA)- | IWYDGSKRYYADSVKGRFTISRDNSKNTLFLQMNSLRAEDTAVYYCATND | |
| | CH3(knobs) | DYWGQGTLVTVSSASTKGPSVFPLAPSSKSTSGGTAALGCLVKDYFPEPV | |
| | | TVSWNSGALTSGVHTFPAVLQSSGLYSLSSVVTVPSSSLGTQTYICNVNH | |
| | | KPSNTKVDKKVEPKSCDKTHTCPPCPAPEAAGGPSVFLFPPKPKDTLMIS | |
| | | RTPEVTCVVVDVSHEDPEVKFNWYVDGVEVHNAKTKPREEQYNSTYRVVS | |
| | | VLTVLHQDWLNGKEYKCKVSNKALPAPIEKTISKAKGQPREPQVYTLPPS | |
| | | REEMTKNQVSLWCLVKGFYPSDIAVEWESNGQPENNYKTTPPVLDSDGSF | |
| | | FLYSKLTVDKSRWQQGNVFSCSVMHEALHNHYTQKSLSLSPGK | |
| | AB426 VK-CK | EIVLTQSPATLSLSPGERATLSCRASQSVSSYLAWYQQKPGQAPRLLIYD | 249 |
| | | ASNRATGIPARFSGSGSGTDFTLTISSLEPEDFAVYYCQQSSNWPRTFGQ | |
| | | GTKVEIKRTVAAPSVFIFPPSDEQLKSGTASVVCLLNNFYPREAKVQWKV | |
| | | DNALQSGNSQESVTEQDSKDSTYSLSSTLTLSKADYEKHKVYACEVTHQG | |
| | | LSSPVTKSFNRGEC | |
| | Cetuximab VH- | QVQLKQSGPGLVQPSQSLSITCTVSGFSLTNYGVHWVRQSPGKGLEWLGV | 250 |
| | linker-AB002 VH- | IWSGGNTDYNTPFTSRLSINKDNSKSQVFFKMNSLQSNDTAIYYCARALT | |
| | CH1-hinge- | YYDYEFAYWGQGTLVTVSAASTKGPSVFPLAPQVQLQQSGAELARPGASV | |
| | CH2(LALA)- | KMSCKASGYTFTRYTMHWVKQRPGQGLEWIGYINPSRGYTNYNQKFKDKA | |
| | CH3(holes) | TLTTDKSSSTAYMQLSSLTSEDSAVYYCARYYDDHYCLDYWGQGTTLTVS | |
| | | SASTKGPSVFPLAPSSKSTSGGTAALGCLVKDYFPEPVTVSWNSGALTSG | |
| | | VHTFPAVLQSSGLYSLSSVVTVPSSSLGTQTYICNVNHKPSNTKVDKKVE | |
| | | PKSCDKTHTCPPCPAPEAAGGPSVFLFPPKPKDTLMISRTPEVTCVVVDV | |
| | | SHEDPEVKFNWYVDGVEVHNAKTKPREEQYNSTYRVVSVLTVLHQDWLNG | |
| | | KEYKCKVSNKALPAPIEKTISKAKGQPREPQVYTLPPSREEMTKNQVSLS | |
| | | CAVKGFYPSDIAVEWESNGQPENNYKTTPPVLDSDGSFFLVSKLTVDKSR | |
| | | WQQGNVFSCSVMHEALHNHYTQKSLSLSPGK | |
| | Cetuximab VK- | DILLTQSPVILSVSPGERVSFSCRASQSIGTNIHWYQQRTNGSPRLLIKY | 251 |
| | linker-AB002 VK- | ASESISGIPSRFSGSGSGTDFTLSINSVESEDIADYYCQQNNNWPTTFGA | |
| | CK | GTKLELKRTVAAPSVFIFPPQIVLTQSPAIMSASPGEKVTMTCRASSSVS | |
| | | YMNWYQQKSGTSPKRWIYDTSKVASGVPYRFSGSGSGTSYSLTISSMEAE | |
| | | DAATYYCQQWSSNPLTFGSGTKLEINRTVAAPSVFIFPPSDEQLKSGTAS | |
| | | VVCLLNNFYPREAKVQWKVDNALQSGNSQESVTEQDSKDSTYSLSSTLTL | |
| | | SKADYEKHKVYACEVTHQGLSSPVTKSFNRGEC | |
| DVD889 [hu | DVD889 heavy | EVQLLESGGDLVRPGGSLRLSCAASGFSFSRYGMSWVRQAPGKGLDWVAH | 252 |
| IgG1/k] | chain | ISASAGATYYADSVKGRFTISRDNSKNTLFLQMNNLRADDTAIYYCAKGG | |
| | | KQWLIPWFDPWGQGTLVTVSSASTKGPEVQLLESGGDLVRPGGSLRLSCA | |
| | | ASGFSFSRYGMSWVRQAPGKGLDWVAHISASAGATYYADSVKGRFTISRD | |
| | | NSKNTLFLQMNNLRADDTAIYYCAKGGKQWLIPWFDPWGQGTLVTVSSAS | |
| | | TKGPSVFPLAPSSKSTSGGTAALGCLVKDYFPEPVTVSWNSGALTSGVHT | |
| | | FPAVLQSSGLYSLSSVVTVPSSSLGTQTYICNVNHKPSNTKVDKKVEPKS | |
| | | CDKTHTCPPCPAPELLGGPSVFLFPPKPKDTLMISRTPEVTCVVVDVSHE | |
| | | DPEVKFNWYVDGVEVHNAKTKPREEQYNSTYRVVSVLTVLHQDWLNGKEY | |
| | | KCKVSNKALPAPIEKTISKAKGQPREPQVYTLPPSREEMTKNQVSLTCLV | |
| | | KGFYPSDIAVEWESNGQPENNYKTTPPVLDSDGSFFLYSKLTVDKSRWQQ | |
| | | GNVFSCSVMHEALHNHYTQKSLSLSPGK | |
| | DVD889 light | DIQMTQSPSSVSASVGDRVTIACRASQDISDRLAWYQQKPGKVPKVLIYG | 253 |
| | chain | ASSLQSGVPSRFSGSGSGTDFTLTINSLQPEDFATYYCQQANSFPLTFGG | |
| | | GTKVEMKRTVAAPDIQMTQSPSSVSASVGDRVTIACRASQDISDRLAWYQ | |
| | | QKPGKVPKVLIYGASSLQSGVPSRFSGSGSGTDFTLTINSLQPEDFATYY | |
| | | CQQANSFPLTFGGGTKVEMKRTVAAPSVFIFPPSDEQLKSGTASVVCLLN | |
| | | NFYPREAKVQWKVDNALQSGNSQESVTEQDSKDSTYSLSSTLTLSKADYE | |
| | | KHKVYACEVTHQGLSSPVTKSFNRGEC | |

[0182] All cloning was completed using homologous recombination and transformation in DH5a cells. All trispecific molecules were expressed in HEK293 cells and purified with MabSelect SuRe beads. Table 17 summarizes the expression yield of each trispecific molecule listed in Table 16.

TABLE 17
Expression Yield Of The Trispecific Molecules

| | Octet Titer | Yield | SEC |
|---|---|---|---|
| Antibody ID | (mg/L) | (mg/L) | Monomer % |
| TMH1 | 14.25 | 12.1 | 96.49 |
| TMH2 | 11.55 | 11 | 69.6 |
| TMH3 | 2.4 | 1.8 | 77.26 |
| TMH4 | 1.15 | 0.8 | 76.52 |
| TMH5 | 7.05 | 6.8 | 57.97 |
| TMH6 | 1.0 | 0.5 | 75.09 |
| TMH7 | 1.2 | 0.84 | 86.74 |
| TMH8 | 1.5 | 1.06 | 81.98 |
| TMH9 | 0.6 | 0.3 | 47.82 |
| TMH10 | 1.6 | 1.46 | 81.45 |
| KIH4 | 5.6 | 2.38 | |
| TMH11 | 4.8 | 5.94 | 56.06 |
| TMH12 | 2.7 | 4.3 | 62.49 |
| TMH13 | 3.4 | 5.02 | 67.15 |
| TMH14 | 1.1 | 1.38 | 38.41 |
| TMH15 | 1.1 | 1.3 | 30.69 |
| KIH5 | | 30.34 | 47.13 |
| TMH16 | 22.3 | 19.6 | 73.65 |
| TMH17 | 10 | 10.2 | 74.4 |
| TMH18 | 35.9 | 27.2 | 69.6 |
| TMH19 | 5.6 | 6 | 84.1 |
| TMH20 | 1.4 | 1.3 | 62.62 |
| KIH6 | 56.3 | 34.6 | 46.65 |
| TMH21 | 1.6 | 1.46 | 69.89 |
| TMH22 | 0.6 | 0.5 | 56.92 |
| TMH23 | 1 | 0.8 | 52.78 |
| TMH24 | 1.2 | 1.36 | 66.59 |
| TMH25 | 1 | 1.06 | 71.64 |
| KIH7 | 11.8 | 8 | 61.08 |

### Example 11.2: FACS Binding Assay for Trispecific Molecules Containing MH2 Domains

[0183] Trispecific molecule TMH1, containing MH2 domains, was tested in a FACS binding assay to confirm that it retained binding affinity to all the three targets (CD2, CD3, and EGFR). The PLY11 knobs-into-holes binding protein, the TS2/18 anti-CD2 halfbody, and the DVD860 anti-EGFR/CD3 halfbody were also tested for comparison. CD3 negative Jurkat cells were used for testing CD2 binding. Regular Jurkat cells were used to test CD2 and CD3 binding. A431 cells were used for testing EGFR binding. Cells were incubated with different concentrations of antibodies for 30 minutes and then incubated with fluorescence-conjugated secondary antibodies for another 30 minutes. Cells were then analyzed by flow cytometry and data was analyzed using FlowJo software. As shown in FIG. 18, TMH1 maintained its binding affinity to all the three targets.

[0184] Trispecific molecules TMH16-18 were tested in a FACS binding assay to confirm that they retained binding affinity to all three targets (PDL1, CD3, and EGFR). The KIH6 knobs-into-holes binding protein, the anti-PDL1 YW243 halfbody and anti-EGFR/CD3 DVD860.2 halfbody were also tested for comparison. A431 cells were used for testing EGFR binding. Jurkat CD3 positive cells were used for testing CD3 binding. CHO-PDL1 cells were used for testing PDL1 binding. Cells were incubated with different concentrations of antibodies for 30 minutes and then incubated with incubated with fluorescence-conjugated secondary antibodies for another 30 minutes. Cells were then analyzed by flow cytometry and data was analyzed using FlowJo software. As shown in FIG. 19B, TMH16-18 maintained their binding affinity to all the three targets. DVD889 [hu IgG1/k], which binds Tetanus toxoid, was used as a negative control.

[0185] Trispecific molecules TMH21-23 were tested in a FACS binding assay to confirm that they retained binding affinity to all three targets (PD1, CD3, and EGFR). The KIH7 knobs-into-holes binding protein, the anti-PD1 AB426 halfbody and anti-EGFR/CD3 DVD860.2 halfbody were also tested for comparison. A431 cells were used for testing EGFR binding. Jurkat CD3 positive cells were used for testing CD3 binding. 293G-PD1 cells were used for testing PD1 binding. Cells were incubated with different concentrations of antibodies for 30 minutes and then incubated with incubated with fluorescence-conjugated secondary antibodies for another 30 minutes. Cells were then analyzed by flow cytometry and data was analyzed using FlowJo software. As shown in FIG. 20B, TMH21-23 maintained their binding affinity to all the three targets. DVD889 [hu IgG1/k] was used as a negative control.

### Example 12: Generation of Tetraspecific Molecules with Wild Type MH2 Homodimer or Engineered MH2a/MH2b Heterodimer

[0186] Table 18 summarizes ten exemplary combinations that can be used to build tetraspecific molecules using MH2/MH2, MH2p/MH2n, or MH2k/MH2h domains in a knobs-into-holes format. In each, VH1 and VL1 are the variable domains taken from one parental antibody, VH2 and VL2 are variable domains from a second parental antibody, VH3 and VL3 are variable domains from a third parental antibody, and VH4 and VL4 are variable domains from a fourth parental antibody. Each tetraspecific molecule is generated with four chains: 2 heavy chains (chain 1 and chain 3) and 2 light chains (chain 2 and chain 4).

TABLE 18
Combinations of 4 Chains That Generate Tetraspecific
Molecules Using MH2/MH2, MH2p/MH2n, Or MH2k/MH2h
Dimers In A Knobs-Into-Holes Format

| | Trispecific IgG Combination | | | |
|---|---|---|---|---|
| | Chain 1 | Chain 2 | Chain 3 | Chain 4 |
| 1 | VH1-linker- | VL1-linker- | VH3-linker- | VL3-linker- |
| | VH2-linker- | VL2-linker- | VH4-CH1-hinge- | VL4-Cκ (λ) |
| | MH2-hinge- | MH2 | CH2—CH3 | |
| | CH2—CH3 | | (holes) | |
| | (knobs) | | | |
| 2 | VH1-linker- | VL1-linker- | VH3-linker- | VL3-linker- |
| | VH2-linker- | VL2-linker- | VH4-CH1-hinge- | VL4-Cκ (λ) |
| | MH2p-hinge- | MH2n | CH2—CH3 | |
| | CH2—CH3 | | (holes) | |
| | (knobs) | | | |
| 3 | VH1-linker- | VL1-linker- | VH3-linker- | VL3-linker- |
| | VH2-linker- | VL2-linker- | VH4-CH1-hinge- | VL4-Cκ (λ) |
| | MH2n-hinge- | MH2p | CH2—CH3 | |
| | CH2—CH3 | | (holes) | |
| | (knobs) | | | |
| 4 | VH1-linker- | VL1-linker- | VH3-linker- | VL3-linker- |
| | VH2-linker- | VL2-linker- | VH4-CH1-hinge- | VL4-Cκ (λ) |
| | MH2k-hinge- | MH2h | CH2—CH3 | |
| | CH2—CH3 | | (holes) | |
| | (knobs) | | | |
| 5 | VH1-linker- | VL1-linker- | VH3-linker- | VL3-linker- |
| | VH2-linker- | VL2-linker- | VH4-CH1-hinge- | VL4-Cκ (λ) |
| | MH2h-hinge- | MH2k | CH2—CH3 | |
| | CH2—CH3 | | (holes) | |
| | (knobs) | | | |
| 6 | VH1-linker- | VL1-linker- | VH3-linker- | VL3-linker- |
| | VH2-linker- | VL2-linker- | VH4-CH1-hinge- | VL4-Cκ (λ) |
| | MH2-hinge- | MH2 | CH2—CH3 | |
| | CH2—CH3 | | (knobs) | |
| | (holes) | | | |
| 7 | VH1-linker- | VL1-linker- | VH3-linker- | VL3-linker- |
| | VH2-linker- | VL2-linker- | VH4-CH1-hinge- | VL4-Cκ (λ) |
| | MH2p-hinge- | MH2n | CH2—CH3 | |
| | CH2—CH3 | | (knobs) | |
| | (holes) | | | |
| 8 | VH1-linker- | VL1-linker- | VH3-linker- | VL3-linker- |
| | VH2-linker- | VL2-linker- | VH4-CH1-hinge- | VL4-Cκ (λ) |
| | MH2n-hinge- | MH2p | CH2—CH3 | |
| | CH2—CH3 | | (knobs) | |
| | (holes) | | | |
| 9 | VH1-linker- | VL1-linker- | VH3-linker- | VL3-linker- |
| | VH2-linker- | VH2-linker- | VH4-CH1-hinge- | VL4-Cκ (λ) |
| | MH2k-hinge- | MH2h | CH2—CH3 | |
| | CH2—CH3 | | (knobs) | |
| | (holes) | | | |
| 10 | VH1-linkner- | VL1-linker- | VH3-linker- | VL3-linker- |
| | VH2-linker- | MH2k | VH4-CH1-hinge- | VL4-Cκ (λ) |
| | MH2h-hinge- | | CH2—CH3 | |
| | CH2—CH3 | | (knobs) | |
| | (holes) | | | |

[0187] Eight Tetraspecific molecules were generated based on chain combination 3 listed in Table 18 with the binding to 4-1BB, CD2, EGFR and CD3. The arrangements of variable domains in each tetra-specific molecule are summarized in the Table 19. All cloning was completed using homologous recombination and transformation in DH5a cells. All tetraspecific molecules were expressed in HEK293 cells and purified with MabSelect SuRe beads. The expression yield of each molecule is summarized in Table 19. The variable domain sequences used to generate the tetraspecific molecules are listed in Table 20. Table 21 summarizes the sequences of the four chains in each of the tetraspecific molecules that were generated and tested.

TABLE 19
Tetraspecific Molecules Containing MH2 Domains

| | Knob heavy/light | | | Hole heavy/light | | | OCTET | yield | |
|---|---|---|---|---|---|---|---|---|---|
| Tetraspecific | VH1/VL1 | linker | VH4/VL2 | VH3/VL3 | linker | VH4/VL4 | (ug/ml) | (mg/L) | SEC % |
| PLY13 | 4-1BB | LL | CD2 | EGFR | LL | CD3 | 0.5 | 0.378 | 93.63 |
| | (AB430) | | (AB765) | (Cetuximab) | | (AB002) | | | |
| PLY14 | 4-1BB | LS | CD2 | EGFR | LL | CD3 | 1.1 | 0.972 | 89.9 |
| | (AB430) | | (AB765) | (Cetuximab) | | (AB002) | | | |
| PLY15 | 4-1BB | SL | CD2 | EGFR | LL | CD3 | 0.6 | 0.567 | 94.92 |
| | (AB430) | | (AB765) | (Cetuximab) | | (AB002) | | | |
| PLY16 | 4-1BB | SS | CD2 | EGFR | LL | CD3 | 0.8 | 0.378 | 87.47 |
| | (AB430) | | (AB765) | (Cetuximab) | | (AB002) | | | |
| PLY17 | CD2 | LL | 4-1BB | EGFR | LL | CD3 | 0.5 | 0.441 | 88.27 |
| | (AB765) | | (AB430) | (Cetuximab) | | (AB002) | | | |
| PLY18 | CD2 | LS | 4-1BB | EGFR | LL | CD3 | 0.7 | 0.621 | 85.52 |
| | (AB765) | | (AB430) | (Cetuximab) | | (AB002) | | | |
| PLY19 | CD2 | SL | 4-1BB | EGFR | LL | CD3 | 0.6 | 0.486 | 94.53 |
| | (AB765) | | (AB430) | (Cetuximab) | | (AB002) | | | |
| PLY20 | CD2 | SS | 4-1BB | EGFR | LL | CD3 | 0.9 | 0.702 | 93.29 |
| | (AB765) | | (AB430) | (Cetuximab) | | (AB002) | | | |

TABLE 20
Antibody Variable Domains Used To Build IgG-Like Molecules Containing
MH2 Domains

| Antibody | | Variable Domain Sequence | SEQ ID |
|---|---|---|---|
| Target | Domain | 1234567890123456769012345678901234567890 | NO. |
| CD3 | CD3 VH | QVQLQQSGAELARPGASVKMSCKASGYTFTRYTMHWVKQR | 254 |
| (AB002) | | PGQGLEWIGYINPSRGYTNYNQKFKDKATLTTDKSSSTAY | |
| | | MQLSSLTSEDSAVYYCARYYDDHYCLDYWGQGTTLTVSS | |
| | CD3 VK | QIVLTQSPAIMSASPGEKVTMTCRASSSVSYMNWYQQKSG | 255 |
| | | TSPKRWIYDTSKVASGVPYRFSGSGSGTSYSLTISSMEAE | |
| | | DAATYYCQWSSNPLTFGSGTKLEIN | |
| EGFR | Cetuximab | QVQLKQSGPGLVQPSQSLSITCTVSGFSLTNYGNHWVRQS | 256 |
| (Cetuximab) | VH | PGKGLEWLGVIWSGGNTDYNTPFTSRLSINKDNSKSQVFF | |
| | | KMNSLQSNDTAIYYCARALTYYDYEFAYWGQGTLVTVSA | |
| | Cetuximab | DILLTQSPVILSVSPGERVSFSCRASQSIGTNIHWYQQRT | 257 |
| | VK | NGSPRLLIKYASESISGIPSRFSGSGSGTDFTLSINSVES | |
| | | EDIADYYCQNNNWPTTFGAGTKLELK | |
| 4-1BB | AB430 VH | QVQLQQWGAGLLKPSETLSLTCAVYGGSFSGYYWSWIRQS | 258 |
| (AB430) | | PEKGLEWIGEINHGGYVTYNPSLESRVTISVDTSKNQFSL | |
| | | KLSSVTAADTAVYYCARDYGPGNYDWYFDLWGRGTLVTVS | |
| | | S | |
| | AB430 VK | EIVLTQSPATLSLSPGERATLSCRASQSVSSYLAWYQQKP | 259 |
| | | GQAPRLLIYDASNRATGIPARFSGSGSGTDFTLTISSLEP | |
| | | EDFAVYYCQQRSNWPPALTFGGGTKVEIK | |
| CD2 | AB765 VH | EVQLVESGGGLVQPGGSLRLSCAASGFAFSSYDMSWVRQA | 260 |
| (AB765) | | PGKGLEWVSYISGGGFTYYPDTVKGRFTISRDNSKNTLYL | |
| | | QMNSLRAEDTAVYYCARQGANWELVYWGQGTLVTVSS | |
| | | EIVLTQSPATLSLSPGERATLSCRASQSISDFLHWYQQKP | 261 |
| | AB765 VK | GQAPRLLIKYASQSISGIPARFSGSGSGTDFTLTISSLEP | |
| | | EDFAVYYCQNGHNFPPTFGGGTKVEIK | |

TABLE 21
Sequences Of Generated Tetraspecific Molecules

| Tetra- | | Sequence | SEQ |
|---|---|---|---|
| specific | Chain | 1234567890123456789012345678901234567890 | NO: |
| PLY13 | AB430VH-L-AB765VH- | QVQLQQWGAGLLKPSETLSLTCAVYGGSFSGYYWSWIRQS | 262 |
| | linker-MH2n-hinge- | PEKGLEWIGEINHGGYVTYNPSLESRVTISVDTSKNQFSL | |
| | CH2-CH3 (knobs) | KLSSVTAADTAVYYCARDYGPGNYDWYFDLWGRGTLVTVS | |
| | | SASTKGPSVFPLAPEVQLVESGGGLVQPGGSLRLSCAASG | |
| | | FAFSSYDMSWVRQAPGKGLEWVSYISGGGFTYYPDTVKGR | |
| | | FTISRDNSKNTLYLQMNSLRAEDTAVYYCARQGANWELVY | |
| | | WGQGTLVTVSSASTELPPKVSVFVPPRDGFFGNPRKSELI | |
| | | CEATGFSPRQIQVSWLREGKQVGSGVTTDQVQAEAKESGP | |
| | | TTYDVTSTLTIKESDWLGQSMFTCRVDHRGLTFQQNASSM | |
| | | CDKTHTCPPCPAPELLGGPSVFLFPPKPKDTLMISRTPEV | |
| | | TCVVVDVSHEDPEVKFNWYVDGVEVHNAKTKPREEQYNST | |
| | | YRVVSVLTVLHQDWLNGKEYKCKVSNKALPAPIEKTISKA | |
| | | KGQPREPQVYTLPPSREEMTKNQVSLWCLVKGFYPSDIAV | |
| | | EWESNGQPENNYKTTPPVLDSDGSFFLYSKLTVDKSRWQQ | |
| | | GNVFSCSVMHEALHNHYTQKSLSLSPGK | |
| | AB430VL-L- | EIVLTQSPATLSLSPGERATLSCRASQSVSSYLAWYQQKP | 263 |
| | AB765VL-linker- | GQAPRLLIYDASNRATGIPARFSGSGSGTDFTLTISSLEP | |
| | MH2p | EDFAVYYCQQRSNWPPALTFGGGTKVEIKRTVAAPSVFIF | |
| | | PPEIVLTQSPATLSLSPGERATLSCRASQSISDFLHWYQQ | |
| | | KPGQAPRLLIKYASQSISGIPARFSGSGSGTDFTLTISSL | |
| | | EPEDFAVYYCQNGHNFPPTFGGGTKVEIKRTAELPPKVSV | |
| | | FVPPRDGFFGNPRKSKLICKATGFSPRQIQVSWLREGKQV | |
| | | GSGVTTKQVQAEAKESGPTTYKVTSTLTIKESDWLGQSMF | |
| | | TCRVDHRGLTFQQNASSMC | |
| | Cetuximab VH- | QVQLKQSGPGLVQPSQSLSITCTVSGFSLTNYGVHWVRQS | 264 |
| | linker-CD3VH- | PGKGLEWLGVIWSGGNTDYNTPFTSRLSINKDNSKSQVFF | |
| | linker-AB002 VH- | KMNSLQSNDTAIYYCARALTYYDYEFAYWGQGTLVTVSAA | |
| | CH1-hinge-CH2- | STKGPSVFPLAPQVQLQQSGAELARPGASVKMSCKASGYT | |
| | CH3 (holes) | FTRYTMHWVKQRPGQGLEWIGYINPSRGYTNYNQKFKDKA | |
| | | TLTTDKSSSTAYMQLSSLTSEDSAVYYCARYYDDHYCLDY | |
| | | WGQGTTLTVSSASTKGPSVFPLAPSSKSTSGGTAALGCLV | |
| | | KDYFPEPVTVSWNSGALTSGVHTFPAVLQSSGLYSLSSVV | |
| | | TVPSSSLGTQTYICNVNHKPSNTKVDKKVEPKSCDKTHTC | |
| | | PPCPAPELLGGPSVFLFPPKPKDTLMISRTPEVTCVVVDV | |
| | | SHEDPEVKFNWYVDGVEVHNAKTKPREEQYNSTYRVVSVL | |
| | | TVLHQDWLNGKEYKCKVSNKALPAPIEKTISKAKGQPREP | |
| | | QVYTLPPSREEMTKNQVSLSCAVKGFYPSDIAVEWESNGQ | |
| | | PENNYKTTPPVLDSDGSFFLVSKLTVDKSRWQQGNVFSCS | |
| | | VMHEALHNHYTQKSLSLSPGK | |
| | Cetuximab VK- | DILLTQSPVILSVSPGERVSFSCRASQSIGTNIHWYQQRT | 265 |
| | linker-CD3VK- | NGSPRLLIKYASESISGIPSRFSGSGSGTDFTLSINSVES | |
| | linker-AB002 VK- | EDIADYYCQQNNNWPTTFGAGTKLELKRTVAAPSVFIFPP | |
| | Ck | QIVLTQSPAIMSASPGEKVTMTCRASSSVSYMNWYQQKSG | |
| | | TSPKRWIYDTSKVASGVPYRFSGSGSGTSYSLTISSMEAE | |
| | | DAATYYCQQWSSNPLTFGSGTKLEINRTVAAPSVFIFPPS | |
| | | DEQLKSGTASVVCLLNNFYPREAKVQWKVDNALQSGNSQE | |
| | | SVTEQDSKDSTYSLSSTLTLSKADYEKHKVYACEVTHQGL | |
| | | SSPVTKSFNRGEC | |
| PLY14 | AB430VH-L- | QVQLQQWGAGLLKPSETLSLTCAVYGGSFSGYYWSWIRQS | 266 |
| | AB765VH-linker- | PEKGLEWIGEINHGGYVTYNPSLESRVTISVDTSKNQFSL | |
| | MH2n-hinge-CH2- | KLSSVTAADTAVYYCARDYGPGNYDWYFDLWGRGTLVTVS | |
| | CH3 (knobs) | aASTKGPSVFPLAPEVQLVESGGGLVQPGGSLRLSCAASG | |
| | | FAFSSYDMSWVRQAPGKGLEWVSYISGGGFTYYPDTVKGR | |
| | | FTISRDNSKNTLYLQMNSLRAEDTAVYYCARQGANWELVY | |
| | | WGQGTLVTVSSASTELPPKVSVFVPPRDGFFGNPRKSELI | |
| | | CEATGFSPRQIQVSWLREGKQVGSGVTTDQVQAEAKESGP | |
| | | TTYDVTSTLTIKESDWLGQSMFTCRVDHRGLTFQQNASSM | |
| | | CDKTHTCPPCPAPELLGGPSVFLFPPKPKDTLMISRTPEV | |
| | | TCVVVDVSHEDPEVKFNWYVDGVEVHNAKTKPREEQYNST | |
| | | YRVVSVLTVLHQDWLNGKEYKCKVSNKALPAPIEKTISKA | |
| | | KGQPREPQVYTLPPSREEMTKNQVSLWCLVKGFYPSDIAV | |
| | | EWESNGQPENNYKTTPPVLDSDGSFFLYSKLTVDKSRWQQ | |
| | | GNVFSCSVMHEALHNHYTQKSLSLSPGK | |
| | AB430VL-S- | EIVLTQSPATLSLSPGERATLSCRASQSVSSYLAWYQQKP | 267 |
| | AB765VL-linker- | GQAPRLLIYDASNRATGIPARFSGSGSGTDFTLTISSLEP | |
| | MH2p | EDFAVYYCQQRSNWPPALTFGGGTKVEIKRTVAAPEIVLT | |
| | | QSPATLSLSPGERATLSCRASQSISDFLHWYQQKPGQAPR | |
| | | LLIKYASQSISGIPARFSGSGSGTDFTLTISSLEPEDFAV | |
| | | YYCQNGHNFPPTFGGGTKVEIKRTAELPPKVSVFVPPRDG | |
| | | FFGNPRKSKLICKATGFSPRQIQVSWLREGKQVGSGVTTK | |
| | | QVQAEAKESGPTTYKVTSTLTIKESDWLGQSMFTCRVDHR | |
| | | GLTFQQNASSMC | |
| | Cetuximab VH- | QVQLKQSGPGLVQPSQSLSITCTVSGFSLTNYGVHWVRQS | 268 |
| | linker-CD3VH- | PGKGLEWLGVIWSGGNTDYNTPFTSRLSINKDNSKSQVFF | |
| | linker-AB002 VH- | KMNSLQSNDTAIYYCARALTYYDYEFAYWGQGTLVTVSAA | |
| | CH1-hinge-CH2- | STKGPSVFPLAPQVQLQQSGAELARPGASVKMSCKASGYT | |
| | CH3 (holes) | FTRYTMHWVKQRPGQGLEWIGYINPSRGYTNYNQKFKDKA | |
| | | TLTTDKSSSTAYMQLSSLTSEDSAVYYCARYYDDHYCLDY | |
| | | WGQGTTLTVSSASTKGPSVFPLAPSSKSTSGGTAALGCLV | |
| | | KDYFPEPVTVSWNSGALTSGVHTFPAVLQSSGLYSLSSVV | |
| | | TVPSSSLGTQTYICNVNHKPSNTKVDKKVEPKSCDKTHTC | |
| | | PPCPAPELLGGPSVFLFPPKPKDTLMISRTPEVTCVVVDV | |
| | | SHEDPEVKFNWYVDGVEVHNAKTKPREEQYNSTYRVVSVL | |
| | | TVLHQDWLNGKEYKCKVSNKALPAPIEKTISKAKGQPREP | |
| | | QVYTLPPSREEMTKNQVSLSCAVKGFYPSDIAVEWESNGQ | |
| | | PENNYKTTPPVLDSDGSFFLVSKLTVDKSRWQQGNVFSCS | |
| | | VMHEALHNHYTQKSLSLSPGK | |
| | Cetuximab VK- | DILLTQSPVILSVSPGERVSFSCRASQSIGTNIHWYQQRT | 269 |
| | linker-CD3VK- | NGSPRLLIKYASESISGIPSRFSGSGSGTDFTLSINSVES | |
| | linker-AB002 VK- | EDIADYYCQQNNNWPTTFGAGTKLELKRTVAAPSVFIFPP | |
| | Ck | QIVLTQSPAIMSASPGEKVTMTCRASSSVSYMNWYQQKSG | |
| | | TSPKRWIYDTSKVASGVPYRFSGSGSGTSYSLTISSMEAE | |
| | | DAATYYCQQWSSNPLTFGSGTKLEINRTVAAPSVFIFPPS | |
| | | DEQLKSGTASVVCLLNNFYPREAKVQWKVDNALQSGNSQE | |
| | | SVTEQDSKDSTYSLSSTLTLSKADYEKHKVYACEVTHQGL | |
| | | SSPVTKSFNRGEC | |
| PLY15 | AB430VH-S- | QVQLQQWGAGLLKPSETLSLTCAVYGGSFSGYYWSWIRQS | 270 |
| | AB765VH-linker- | PEKGLEWIGEINHGGYVTYNPSLESRVTISVDTSKNQFSL | |
| | MH2n-hinge-CH2- | KLSSVTAADTAVYYCARDYGPGNYDWYFDLWGRGTLVTVS | |
| | CH3 (knobs) | aASTKGPEVQLVESGGGLVQPGGSLRLSCAASGFAFSSYD | |
| | | MSWVRQAPGKGLEWVSYISGGGFTYYPDTVKGRFTISRDN | |
| | | SKNTLYLQMNSLRAEDTAVYYCARQGANWELVYWGQGTLV | |
| | | TVSSASTELPPKVSVFVPPRDGFFGNPRKSELICEATGFS | |
| | | PRQIQVSWLREGKQVGSGVTTDQVQAEAKESGPTTYDVTS | |
| | | TLTIKESDWLGQSMFTCRVDHRGLTFQQNASSMCDKTHTC | |
| | | PPCPAPELLGGPSVFLFPPKPKDTLMISRTPEVTCVVVDV | |
| | | SHEDPEVKFNWYVDGVEVHNAKTKPREEQYNSTYRVVSVL | |
| | | TVLHQDWLNGKEYKCKVSNKALPAPIEKTISKAKGQPREP | |
| | | QVYTLPPSREEMTKNQVSLWCLVKGFYPSDIAVEWESNGQ | |
| | | PENNYKTTPPVLDSDGSFFLYSKLTVDKSRWQQGNVFSCS | |
| | | VMHEALHNHYTQKSLSLSPGK | |
| | AB430VL-L- | EIVLTQSPATLSLSPGERATLSCRASQSVSSYLAWYQQKP | 271 |
| | AB765VL-linker- | GQAPRLLIYDASNRATGIPARFSGSGSGTDFTLTISSLEP | |
| | MH2p | EDFAVYYCQQRSNWPPALTFGGGTKVEIKRTVAAPSVFIF | |
| | | PPEIVLTQSPATLSLSPGERATLSCRASQSISDFLHWYQQ | |
| | | KPGQAPRLLIKYASQSISGIPARFSGSGSGTDFTLTISSL | |
| | | EPEDFAVYYCQNGHNFPPTFGGGTKVEIKRTAELPPKVSV | |
| | | EVPPRDGFFGNPRKSKLICKATGFSPRQIQVSWLREGKQV | |
| | | GSGVTTKQVQAEAKESGPTTYKVTSTLTIKESDWLGQSMF | |
| | | TCRVDHRGLTFQQNASSMC | |
| | Cetuximab VH- | QVQLKQSGPGLVQPSQSLSITCTVSGFSLTNYGVHWVRQS | 272 |
| | linker-CD3VH- | PGKGLEWLGVIWSGGNTDYNTPFTSRLSINKDNSKSQVFF | |
| | linker-AB002 VH- | KMNSLQSNDTAIYYCARALTYYDYEFAYWGQGTLVTVSAA | |
| | CH1-hinge-CH2- | STKGPSVFPLAPQVQLQQSGAELARPGASVKMSCKASGYT | |
| | CH3 (holes) | FTRYTMHWVKQRPGQGLEWIGYINPSRGYTNYNQKFKDKA | |
| | | TLTTDKSSSTAYMQLSSLTSEDSAVYYCARYYDDHYCLDY | |
| | | WGQGTTLTVSSASTKGPSVFPLAPSSKSTSGGTAALGCLV | |
| | | KDYFPEPVTVSWNSGALTSGVHTFPAVLQSSGLYSLSSVV | |
| | | TVPSSSLGTQTYICNVNHKPSNTKVDKKVEPKSCDKTHTC | |
| | | PPCPAPELLGGPSVFLFPPKPKDTLMISRTPEVTCVVVDV | |
| | | SHEDPEVKFNWYVDGVEVHNAKTKPREEQYNSTYRVVSVL | |
| | | TVLHQDWLNGKEYKCKVSNKALPAPIEKTISKAKGQPREP | |
| | | QVYTLPPSREEMTKNQVSLSCAVKGFYPSDIAVEWESNGQ | |
| | | PENNYKTTPPVLDSDGSFFLVSKLTVDKSRWQQGNVFSCS | |
| | | VMHEALHNHYTQKSLSLSPGK | |
| | Cetuximab VK- | DILLTQSPVILSVSPGERVSFSCRASQSIGTNIHWYQQRT | 273 |
| | linker-CD3VK- | NGSPRLLIKYASESISGIPSRFSGSGSGTDFTLSINSVES | |
| | linker-AB002 VK- | EDIADYYCQQNNNWPTTFGAGTKLELKRTVAAPSVFIFPP | |
| | Ck | QIVLTQSPAIMSASPGEKVTMTCRASSSVSYMNWYQQKSG | |
| | | TSPKRWIYDTSKVASGVPYRFSGSGSGTSYSLTISSMEAE | |
| | | DAATYYCQQWSSNPLTFGSGTKLEINRTVAAPSVFIFPPS | |
| | | VDEQLKSGTASVVCLLNNFYPREAKVQWKVDNALQSGNSQE | |
| | | SVTEQDSKDSTYSLSSTLTLSKADYEKHKVYACEVTHQGL | |
| | | SSPVTKSFNRGEC | |
| PLY16 | AB430VH-S- | QVQLQQWGAGLLKPSETLSLTCAVYGGSFSGYYWSWIRQS | 274 |
| | AB765VH-linker- | PEKGLEWIGEINHGGYVTYNPSLESRVTISVDTSKNQFSL | |
| | MH2n-hinge-CH2- | KLSSVTAADTAVYYCARDYGPGNYDWYFDLWGRGTLVTVS | |
| | CH3 (knobs) | SASTKGPEVQLVESGGGLVQPGGSLRLSCAASGFAFSSYD | |
| | | MSWVRQAPGKGLEWVSYISGGGFTYYPDTVKGRFTISRDN | |
| | | SKNTLYLQMNSLRAEDTAVYYCARQGANWELVYWGQGTLV | |
| | | TVSSASTELPPKVSVFVPPRDGFFGNPRKSELICEATGFS | |
| | | PRQIQVSWLREGKQVGSGVTTDQVQAEAKESGPTTYDVTS | |
| | | TLTIKESDWLGQSMFTCRVDHRGLTFQQNASSMCDKTHTC | |
| | | PPCPAPELLGGPSVFLFPPKPKDTLMISRTPEVTCVVVDV | |
| | | SHEDPEVKFNWYVDGVEVHNAKTKPREEQYNSTYRVVSVL | |
| | | TVLHQDWLNGKEYKCKVSNKALPAPIEKTISKAKGQPREP | |
| | | QVYTLPPSREEMTKNQVSLWCLVKGFYPSDIAVEWESNGQ | |
| | | PENNYKTTPPVLDSDGSFFLYSKLTVDKSRWQQGNVFSCS | |
| | | VMHEALHNHYTQKSLSLSPGK | |
| | AB430VL-S- | EIVLTQSPATLSLSPGERATLSCRASQSVSSYLAWYQQKP | 275 |
| | AB765VL-linker- | GQAPRLLIYDASNRATGIPARFSGSGSGTDFTLTISSLEP | |
| | MH2p | EDFAVYYCQQRSNWPPALTFGGGTKVEIKRTVAAPEIVLT | |
| | | QSPATLSLSPGERATLSCRASQSISDFLHWYQQKPGQAPR | |
| | | LLIKYASQSISGIPARFSGSGSGTDFTLTISSLEPEDFAV | |
| | | YYCQNGHNFPPTFGGGTKVEIKRTAELPPKVSVFVPPRDG | |
| | | FFGNPRKSKLICKATGFSPRQIQVSWLREGKQVGSGVTTK | |
| | | QVQAEAKESGPTTYKVTSTLTIKESDWLGQSMFTCRVDHR | |
| | | GLTFQQNASSMC | |
| | Cetuximab VH- | QVQLKQSGPGLVQPSQSLSITCTVSGFSLTNYGVHWVRQS | 276 |
| | linker-CD3VH- | PGKGLEWLGVIWSGGNTDYNTPFTSRLSINKDNSKSQVFF | |
| | linker-AB002 VH- | KMNSLQSNDTAIYYCARALTYYDYEFAYWGQGTLVTVSAA | |
| | CH1-hinge-CH2- | STKGPSVFPLAPQVQLQQSGAELARPGASVKMSCKASGYT | |
| | CH3 (holes) | FTRYTMHWVKQRPGQGLEWIGYINPSRGYTNYNQKFKDKA | |
| | | TLTTDKSSSTAYMQLSSLTSEDSAVYYCARYYDDHYCLDY | |
| | | WGQGTTLTVSSASTKGPSVFPLAPSSKSTSGGTAALGCLV | |
| | | KDYFPEPVTVSWNSGALTSGVHTFPAVLQSSGLYSLSSVV | |
| | | TVPSSSLGTQTYICNVNHKPSNTKVDKKVEPKSCDKTHTC | |
| | | PPCPAPELLGGPSVFLFPPKPKDTLMISRTPEVTCVVVDV | |
| | | SHEDPEVKFNWYVDGVEVHNAKTKPREEQYNSTYRVVSVL | |
| | | TVLHQDWLNGKEYKCKVSNKALPAPIEKTISKAKGQPREP | |
| | | QVYTLPPSREEMTKNQVSLSCAVKGFYPSDIAVEWESNGQ | |
| | | PENNYKTTPPVLDSDGSFFLVSKLTVDKSRWQQGNVFSCS | |
| | | VMHEALHNHYTQKSLSLSPGK | |
| | Cetuximab VK- | DILLTQSPVILSVSPGERVSFSCRASQSIGTNIHWYQQRT | 277 |
| | linker-CD3VK- | NGSPRLLIKYASESISGIPSRFSGSGSGTDFTLSINSVES | |
| | linker-AB002 VK- | EDIADYYCQQNNNWPTTFGAGTKLELKRTVAAPSVFIFPP | |
| | Ck | QIVLTQSPAIMSASPGEKVTMTCRASSSVSYMNWYQQKSG | |
| | | TSPKRWIYDTSKVASGVPYRFSGSGSGTSYSLTISSMEAE | |
| | | DAATYYCQQWSSNPLTFGSGTKLEINRTVAAPSVFIFPPS | |
| | | DEQLKSGTASVVCLLNNFYPREAKVQWKVDNALQSGNSQE | |
| | | SVTEQDSKDSTYSLSSTLTLSKADYEKHKVYACEVTHQGL | |
| | | SSPVTKSFNRGEC | |
| PLY17 | AB765VH-L- | EVQLVESGGGLVQPGGSLRLSCAASGFAFSSYDMSWVRQA | 278 |
| | AB430VH-linker- | PGKGLEWVSYISGGGFTYYPDTVKGRFTISRDNSKNTLYL | |
| | MH2n-hinge-CH2- | QMNSLRAEDTAVYYCARQGANWELVYWGQGTLVTVSSAST | |
| | CH3 (knobs) | KGPSVFPLAPQVQLQQWGAGLLKPSETLSLTCAVYGGSFS | |
| | | GYYWSWIRQSPEKGLEWIGEINHGGYVTYNPSLESRVTIS | |
| | | VDTSKNQFSLKLSSVTAADTAVYYCARDYGPGNYDWYFDL | |
| | | WGRGTLVTVSSASTELPPKVSVFVPPRDGFFGNPRKSELI | |
| | | CEATGFSPRQIQVSWLREGKQVGSGVTTDQVQAEAKESGP | |
| | | TTYDVTSTLTIKESDWLGQSMFTCRVDHRGLTFQQNASSM | |
| | | CDKTHTCPPCPAPELLGGPSVFLFPPKPKDTLMISRTPEV | |
| | | TCVVVDVSHEDPEVKFNWYVDGVEVHNAKTKPREEQYNST | |
| | | YRVVSVLTVLHQDWLNGKEYKCKVSNKALPAPIEKTISKA | |
| | | KGQPREPQVYTLPPSREEMTKNQVSLWCLVKGFYPSDIAV | |
| | | EWESNGQPENNYKTTPPVLDSDGSFFLYSKLTVDKSRWQQ | |
| | | GNVFSCSVMHEALHNHYTQKSLSLSPGK | |
| | AB765VL-L- | EIVLTQSPATLSLSPGERATLSCRASQSISDFLHWYQQKP | 279 |
| | AB430VL-linker- | GQAPRLLIKYASQSISGIPARFSGSGSGTDFTLTISSLEP | |
| | MH2p | EDFAVYYCQNGHNFPPTFGGGTKVEIKRTVAAPSVFIFPP | |
| | | EIVLTQSPATLSLSPGERATLSCRASQSVSSYLAWYQQKP | |
| | | GQAPRLLIYDASNRATGIPARFSGSGSGTDFTLTISSLEP | |
| | | EDFAVYYCQQRSNWPPALTFGGGTKVEIKRTAELPPKVSV | |
| | | FVPPRDGFFGNPRKSKLICKATGFSPRQIQVSWLREGKQV | |
| | | GSGVTTKQVQAEAKESGPTTYKVTSTLTIKESDWLGQSMF | |
| | | TCRVDHRGLTFQQNASSMC | |
| | Cetuximab VH- | QVQLKQSGPGLVQPSQSLSITCTVSGFSLTNYGVHWVRQS | 280 |
| | linker-CD3VH- | PGKGLEWLGVIWSGGNTDYNTPFTSRLSINKDNSKSQVFF | |
| | linker-AB002 VH- | KMNSLQSNDTAIYYCARALTYYDYEFAYWGQGTLVTVSAA | |
| | CH1-hinge-CH2- | STKGPSVFPLAPQVQLQQSGAELARPGASVKMSCKASGYT | |
| | CH3 (holes) | FTRYTMHWVKQRPGQGLEWIGYINPSRGYTNYNQKFKDKA | |
| | | TLTTDKSSSTAYMQLSSLTSEDSAVYYCARYYDDHYCLDY | |
| | | WGQGTTLTVSSASTKGPSVFPLAPSSKSTSGGTAALGCLV | |
| | | KDYFPEPVTVSWNSGALTSGVHTFPAVLQSSGLYSLSSVV | |
| | | TVPSSSLGTQTYICNVNHKPSNTKVDKKVEPKSCDKTHTC | |
| | | PPCPAPELLGGPSVFLFPPKPKDTLMISRTPEVTCVVVDV | |
| | | SHEDPEVKFNWYVDGVEVHNAKTKPREEQYNSTYRVVSVL | |
| | | TVLHQDWLNGKEYKCKVSNKALPAPIEKTISKAKGQPREP | |
| | | QVYTLPPSREEMTKNQVSLSCAVKGFYPSDIAVEWESNGQ | |
| | | PENNYKTTPPVLDSDGSFFLVSKLTVDKSRWQQGNVFSCS | |
| | | VMHEALHNHYTQKSLSLSPGK | |
| | Cetuximab VK- | DILLTQSPVILSVSPGERVSFSCRASQSIGTNIHWYQQRT | 281 |
| | linker-CD3VK- | NGSPRLLIKYASESISGIPSRFSGSGSGTDFTLSINSVES | |
| | linker-AB002 VK- | EDIADYYCQQNNNWPTTFGAGTKLELKRTVAAPSVFIFPP | |
| | Ck | QIVLTQSPAIMSASPGEKVTMTCRASSSVSYMNWYQQKSG | |
| | | TSPKRWIYDTSKVASGVPYRFSGSGSGTSYSLTISSMEAE | |
| | | DAATYYCQQWSSNPLTFGSGTKLEINRTVAAPSVFIFPPS | |
| | | DEQLKSGTASVVCLLNNFYPREAKVQWKVDNALQSGNSQE | |
| | | SVTEQDSKDSTYSLSSTLTLSKADYEKHKVYACEVTHQGL | |
| | | SSPVTKSFNRGEC | |
| PLY18 | AB765VH-L- | EVQLVESGGGLVQPGGSLRLSCAASGFAFSSYDMSWVRQA | 282 |
| | AB430VH-linker- | PGKGLEWVSYISGGGFTYYPDTVKGRFTISRDNSKNTLYL | |
| | MH2n-hinge-CH2- | QMNSLRAEDTAVYYCARQGANWELVYWGQGTLVTVSSAST | |
| | CH3 (knobs) | KGPSVFPLAPQVQLQQWGAGLLKPSETLSLTCAVYGGSFS | |
| | | GYYWSWIRQSPEKGLEWIGEINHGGYVTYNPSLESRVTIS | |
| | | VDTSKNQFSLKLSSVTAADTAVYYCARDYGPGNYDWYFDL | |
| | | WGRGTLVTVSSASTELPPKVSVFVPPRDGFFGNPRKSELI | |
| | | CEATGFSPRQIQVSWLREGKQVGSGVTTDQVQAEAKESGP | |
| | | TTYDVTSTLTIKESDWLGQSMFTCRVDHRGLTFQQNASSM | |
| | | CDKTHTCPPCPAPELLGGPSVFLFPPKPKDTLMISRTPEV | |
| | | TCVVVDVSHEDPEVKFNWYVDGVEVHNAKTKPREEQYNST | |
| | | YRVVSVLTVLHQDWLNGKEYKCKVSNKALPAPIEKTISKA | |
| | | KGQPREPQVYTLPPSREEMTKNQVSLWCLVKGFYPSDIAV | |
| | | EWESNGQPENNYKTTPPVLDSDGSFFLYSKLTVDKSRWQQ | |
| | | GNVFSCSVMHEALHNHYTQKSLSLSPGK | |
| | AB765VL-S- | EIVLTQSPATLSLSPGERATLSCRASQSISDFLHWYQQKP | 283 |
| | AB430VL-linker- | GQAPRLLIKYASQSISGIPARFSGSGSGTDFTLTISSLEP | |
| | MH2p | EDFAVYYCQNGHNFPPTFGGGTKVEIKRTVAAPEIVLTQS | |
| | | PATLSLSPGERATLSCRASQSVSSYLAWYQQKPGQAPRLL | |
| | | IYDASNRATGIPARFSGSGSGTDFTLTISSLEPEDFAVYY | |
| | | CQQRSNWPPALTFGGGTKVEIKRTAELPPKVSVFVPPRDG | |
| | | FFGNPRKSKLICKATGFSPRQIQVSWLREGKQVGSGVTTK | |
| | | QVQAEAKESGPTTYKVTSTLTIKESDWLGQSMFTCRVDHR | |
| | | GLTFQQNASSMC | |
| | Cetuximab VH- | QVQLKQSGPGLVQPSQSLSITCTVSGFSLTNYGVHWVRQS | 284 |
| | linker-CD3VH- | PGKGLEWLGVIWSGGNTDYNTPFTSRLSINKDNSKSQVFF | |
| | linker-AB002 VH- | KMNSLQSNDTAIYYCARALTYYDYEFAYWGQGTLVTVSAA | |
| | CH1-hinge-CH2- | STKGPSVFPLAPQVQLQQSGAELARPGASVKMSCKASGYT | |
| | CH3 (holes) | FTRYTMHWVKQRPGQGLEWIGYINPSRGYTNYNQKFKDKA | |
| | | TLTTDKSSSTAYMQLSSLTSEDSAVYYCARYYDDHYCLDY | |
| | | WGQGTTLTVSSASTKGPSVFPLAPSSKSTSGGTAALGCLV | |
| | | KDYFPEPVTVSWNSGALTSGVHTFPAVLQSSGLYSLSSVV | |
| | | TVPSSSLGTQTYICNVNHKPSNTKVDKKVEPKSCDKTHTC | |
| | | PPCPAPELLGGPSVFLFPPKPKDTLMISRTPEVTCVVVDV | |
| | | SHEDPEVKFNWYVDGVEVHNAKTKPREEQYNSTYRVVSVL | |
| | | TVLHQDWLNGKEYKCKVSNKALPAPIEKTISKAKGQPREP | |
| | | QVYTLPPSREEMTKNQVSLSCAVKGFYPSDIAVEWESNGQ | |
| | | PENNYKTTPPVLDSDGSFFLVSKLTVDKSRWQQGNVFSCS | |
| | | VMHEALHNHYTQKSLSLSPGK | |
| | Cetuximab VK- | DILLTQSPVILSVSPGERVSFSCRASQSIGTNIHWYQQRT | 285 |
| | linker-CD3VK- | NGSPRLLIKYASESISGIPSRFSGSGSGTDFTLSINSVES | |
| | linker-AB002 VK- | EDIADYYCQQNNNWPTTFGAGTKLELKRTVAAPSVFIFPP | |
| | Ck | QIVLTQSPAIMSASPGEKVTMTCRASSSVSYMNWYQQKSG | |
| | | TSPKRWIYDTSKVASGVPYRFSGSGSGTSYSLTISSMEAE | |
| | | DAATYYCQQWSSNPLTFGSGTKLEINRTVAAPSVFIFPPS | |
| | | DEQLKSGTASVVCLLNNFYPREAKVQWKVDNALQSGNSQE | |
| | | SVTEQDSKDSTYSLSSTLTLSKADYEKHKVYACEVTHQGL | |
| | | SSPVTKSFNRGEC | |
| PLY19 | AB765VH-S- | EVQLVESGGGLVQPGGSLRLSCAASGFAFSSYDMSWVRQA | 286 |
| | AB430VH-linker- | PGKGLEWVSYISGGGFTYYPDTVKGRFTISRDNSKNTLYL | |
| | MH2n-hinge-CH2- | QMNSLRAEDTAVYYCARQGANWELVYWGQGTLVTVSSAST | |
| | CH3 (knobs) | KGPQVQLQQWGAGLLKPSETLSLTCAVYGGSFSGYYWSWI | |
| | | RQSPEKGLEWIGEINHGGYVTYNPSLESRVTISVDTSKNQ | |
| | | FSLKLSSVTAADTAVYYCARDYGPGNYDWYFDLWGRGTLV | |
| | | TVSSASTELPPKVSVFVPPRDGFFGNPRKSELICEATGFS | |
| | | PRQIQVSWLREGKQVGSGVTTDQVQAEAKESGPTTYDVTS | |
| | | TLTIKESDWLGQSMFTCRVDHRGLTFQQNASSMCDKTHTC | |
| | | PPCPAPELLGGPSVFLFPPKPKDTLMISRTPEVTCVVVDV | |
| | | SHEDPEVKFNWYVDGVEVHNAKTKPREEQYNSTYRVVSVL | |
| | | TVLHQDWLNGKEYKCKVSNKALPAPIEKTISKAKGQPREP | |
| | | QVYTLPPSREEMTKNQVSLWCLVKGFYPSDIAVEWESNGQ | |
| | | PENNYKTTPPVLDSDGSFFLYSKLTVDKSRWQQGNVFSCS | |
| | | VMHEALHNHYTQKSLSLSPGK | |
| | AB765VL-L- | EIVLTQSPATLSLSPGERATLSCRASQSISDFLHWYQQKP | 287 |
| | AB430VL-linker- | GQAPRLLIKYASQSISGIPARFSGSGSGTDFTLTISSLEP | |
| | MH2p | EDFAVYYCQNGHNFPPTFGGGTKVEIKRTVAAPSVFIFPP | |
| | | EIVLTQSPATLSLSPGERATLSCRASQSVSSYLAWYQQKP | |
| | | GQAPRLLIYDASNRATGIPARFSGSGSGTDFTLTISSLEP | |
| | | EDFAVYYCQQRSNWPPALTFGGGTKVEIKRTAELPPKVSV | |
| | | EVPPRDGFFGNPRKSKLICKATGFSPRQIQVSWLREGKQV | |
| | | GSGVTTKQVQAEAKESGPTTYKVTSTLTIKESDWLGQSMF | |
| | | TCRVDHRGLTFQQNASSMC | |
| | Cetuximab VH- | QVQLKQSGPGLVQPSQSLSITCTVSGFSLTNYGVHWVRQS | 288 |
| | linker-CD3VH- | PGKGLEWLGVIWSGGNTDYNTPFTSRLSINKDNSKSQVFF | |
| | linker-AB002 VH- | KMNSLQSNDTAIYYCARALTYYDYEFAYWGQGTLVTVSAA | |
| | CH1-hinge-CH2- | STKGPSVFPLAPQVQLQQSGAELARPGASVKMSCKASGYT | |
| | CH3 (holes) | FTRYTMHWVKQRPGQGLEWIGYINPSRGYTNYNQKFKDKA | |
| | | TLTTDKSSSTAYMQLSSLTSEDSAVYYCARYYDDHYCLDY | |
| | | WGQGTTLTVSSASTKGPSVFPLAPSSKSTSGGTAALGCLV | |
| | | KDYFPEPVTVSWNSGALTSGVHTFPAVLQSSGLYSLSSVV | |
| | | TVPSSSLGTQTYICNVNHKPSNTKVDKKVEPKSCDKTHTC | |
| | | PPCPAPELLGGPSVFLFPPKPKDTLMISRTPEVTCVVVDV | |
| | | SHEDPEVKFNWYVDGVEVHNAKTKPREEQYNSTYRVVSVL | |
| | | TVLHQDWLNGKEYKCKVSNKALPAPIEKTISKAKGQPREP | |
| | | QVYTLPPSREEMTKNQVSLSCAVKGFYPSDIAVEWESNGQ | |
| | | PENNYKTTPPVLDSDGSFFLVSKLTVDKSRWQQGNVFSCS | |
| | | VMHEALHNHYTQKSLSLSPGK | |
| | Cetuximab VK- | DILLTQSPVILSVSPGERVSFSCRASQSIGTNIHWYQQRT | 289 |
| | linker-CD3VK- | NGSPRLLIKYASESISGIPSRFSGSGSGTDFTLSINSVES | |
| | linker-AB002 VK- | EDIADYYCQQNNNWPTTFGAGTKLELKRTVAAPSVFIFPP | |
| | Ck | QIVLTQSPAIMSASPGEKVTMTCRASSSVSYMNWYQQKSG | |
| | | TSPKRWIYDTSKVASGVPYRFSGSGSGTSYSLTISSMEAE | |
| | | DAATYYCQQWSSNPLTFGSGTKLEINRTVAAPSVFIFPPS | |
| | | DEQLKSGTASVVCLLNNFYPREAKVQWKVDNALQSGNSQE | |
| | | SVTEQDSKDSTYSLSSTLTLSKADYEKHKVYACEVTHQGL | |
| | | SSPVTKSFNRGEC | |
| PLY20 | AB765VH-S- | EVQLVESGGGLVQPGGSLRLSCAASGFAFSSYDMSWVRQA | 290 |
| | AB430VH-linker- | PGKGLEWVSYISGGGFTYYPDTVKGRFTISRDNSKNTLYL | |
| | MH2n-hinge-CH2- | QMNSLRAEDTAVYYCARQGANWELVYWGQGTLVTVSSAST | |
| | CH3 (knobs) | KGPQVQLQQWGAGLLKPSETLSLTCAVYGGSFSGYYWSWI | |
| | | RQSPEKGLEWIGEINHGGYVTYNPSLESRVTISVDTSKNQ | |
| | | FSLKLSSVTAADTAVYYCARDYGPGNYDWYFDLWGRGTLV | |
| | | TVSSASTELPPKVSVFVPPRDGFFGNPRKSELICEATGFS | |
| | | PRQIQVSWLREGKQVGSGVTTDQVQAEAKESGPTTYDVTS | |
| | | TLTIKESDWLGQSMFTCRVDHRGLTFQQNASSMCDKTHTC | |
| | | PPCPAPELLGGPSVFLFPPKPKDTLMISRTPEVTCVVVDV | |
| | | SHEDPEVKFNWYVDGVEVHNAKTKPREEQYNSTYRVVSVL | |
| | | TVLHQDWLNGKEYKCKVSNKALPAPIEKTISKAKGQPREP | |
| | | QVYTLPPSREEMTKNQVSLWCLVKGFYPSDIAVEWESNGQ | |
| | | PENNYKTTPPVLDSDGSFFLYSKLTVDKSRWQQGNVFSCS | |
| | | VMHEALHNHYTQKSLSLSPGK | |
| | AB765VL-S- | EIVLTQSPATLSLSPGERATLSCRASQSISDFLHWYQQKP | 291 |
| | AB430VL-linker- | GQAPRLLIKYASQSISGIPARFSGSGSGTDFTLTISSLEP | |
| | MH2p | EDFAVYYCQNGHNFPPTFGGGTKVEIKRTVAAPEIVLTQS | |
| | | PATLSLSPGERATLSCRASQSVSSYLAWYQQKPGQAPRLL | |
| | | IYDASNRATGIPARFSGSGSGTDFTLTISSLEPEDFAVYY | |
| | | CQQRSNWPPALTFGGGTKVEIKRTAELPPKVSVFVPPRDG | |
| | | FFGNPRKSKLICKATGFSPRQIQVSWLREGKQVGSGVTTK | |
| | | QVQAEAKESGPTTYKVTSTLTIKESDWLGQSMFTCRVDHR | |
| | | GLTFQQNASSMC | |
| | Cetuximab VH- | QVQLKQSGPGLVQPSQSLSITCTVSGFSLTNYGVHWVRQS | 292 |
| | linker-CD3VH- | PGKGLEWLGVIWSGGNTDYNTPFTSRLSINKDNSKSQVFF | |
| | linker-AB002 VH- | KMNSLQSNDTAIYYCARALTYYDYEFAYWGQGTLVTVSAA | |
| | CH1-hinge-CH2- | STKGPSVFPLAPQVQLQQSGAELARPGASVKMSCKASGYT | |
| | CH3 (holes) | FTRYTMHWVKQRPGQGLEWIGYINPSRGYTNYNQKFKDKA | |
| | | TLTTDKSSSTAYMQLSSLTSEDSAVYYCARYYDDHYCLDY | |
| | | WGQGTTLTVSSASTKGPSVFPLAPSSKSTSGGTAALGCLV | |
| | | KDYFPEPVTVSWNSGALTSGVHTFPAVLQSSGLYSLSSVV | |
| | | TVPSSSLGTQTYICNVNHKPSNTKVDKKVEPKSCDKTHTC | |
| | | PPCPAPELLGGPSVFLFPPKPKDTLMISRTPEVTCVVVDV | |
| | | SHEDPEVKFNWYVDGVEVHNAKTKPREEQYNSTYRVVSVL | |
| | | TVLHQDWLNGKEYKCKVSNKALPAPIEKTISKAKGQPREP | |
| | | QVYTLPPSREEMTKNQVSLSCAVKGFYPSDIAVEWESNGQ | |
| | | PENNYKTTPPVLDSDGSFFLVSKLTVDKSRWQQGNVFSCS | |
| | | VMHEALHNHYTQKSLSLSPGK | |
| | Cetuximab VK- | DILLTQSPVILSVSPGERVSFSCRASQSIGTNIHWYQQRT | 293 |
| | linker-CD3VK- | NGSPRLLIKYASESISGIPSRFSGSGSGTDFTLSINSVES | |
| | linker-AB002 VK- | EDIADYYCQQNNNWPTTFGAGTKLELKRTVAAPSVFIFPP | |
| | Ck | QIVLTQSPAIMSASPGEKVTMTCRASSSVSYMNWYQQKSG | |
| | | TSPKRWIYDTSKVASGVPYRFSGSGSGTSYSLTISSMEAE | |
| | | DAATYYCQQWSSNPLTFGSGTKLEINRTVAAPSVFIFPPS | |
| | | DEQLKSGTASVVCLLNNFYPREAKVQWKVDNALQSGNSQE | |
| | | SVTEQDSKDSTYSLSSTLTLSKADYEKHKVYACEVTHQGL | |
| | | SSPVTKSFNRGEC | |

[0188] Tetraspecific molecules PLY13-20 were tested in a FACS binding assay to confirm that they retained binding affinity to 4-1BB, CD2, CD3, and EGFR. The anti-CD2 TS2/18 half body, anti-4-1BB AB430 halfbody, and anti-EGFR/CD3 DVD860 halfbody were also tested for comparison. A431 cells were used for testing EGFR binding. Jurkat CD3 positive cells were used for testing the combination binding to CD3, CD2 and 4-1BB. Jurkat CD3 negative cells were used for testing the combination binding to CD2 and 4-1BB. Cells were incubated with different concentrations of antibodies for 30 minutes and then incubated with incubated with fluorescence-conjugated secondary antibodies for another 30 minutes. Cells were then analyzed by flow cytometry and data was analyzed using FlowJo software. As shown in FIGS. 21A-C, Tetra-specific molecules maintained their binding affinity to all targets. The inner domain affinity was affected by the linker between the outer and inner VDs on each arm.

### Example 13: Generation of Duo-Fab-Ig Molecules with Wild Type MH2 Homodimer or Engineered MH2a/MH2b Heterodimer

[0189] As discussed in Example 7 and shown in FIG. 11, wild type MH2 homo-dimers or engineered MH2a/MH2b hetero-dimers may be used in DVD-Ig constructs to stabilize the outer variable domain and increase inner domain accessibility by using a single linker on the heavy or light chain. Duo-Fab-Ig is one of the formats listed in FIG. 11. Variable domains from one anti-STEAP1 antibody TPP3956 and one anti-PSMA antibody hPSMA17.1 were used to build Duo-Fab-Ig molecules. Two Duo-Fab-Ig molecules (NBDV001 and NBDV002) and one non-MH2 containing molecule (NBDV003) were generated. As shown in Table 22 and FIG. 22A, there are three chains in each molecules: one heavy chain containing MH2n after the first variable domain, one light chain containing MH2p with the variable domain pairing with the first variable domain on the heavy chain, and one light chain with the variable domain pairing with the second variable domain on the heavy chain incorporated in Ck. All cloning was completed using homologous recombination and transformation in DH5a cells. All Duo-Fab-Ig molecules were expressed in HEK293 cells and purified with MabSelect SuRe beads. The Duo-Fab-Ig molecules containing MH2 domains showed comparable expression levels and improved SEC monomer %, when compared to the expression level and SEC profile of the non-MH2 molecule NBDV003. The variable domain sequences used to generate the Duo-Fab-Ig molecules are listed in Table 23. Table 24 summarizes the sequences of the four chains in each of the tetraspecific molecules that were generated and tested.

TABLE 22
Duo-Fab-Ig Molecules Containing MH2 Domains

| | | | | Yield | |
|---|---|---|---|---|---|
| | Chain 1 | Chain 2 | Chain 3 | (mg/L) | SEC |
| NBDV001 | TPP3956VH-MH2n- | TPP3956VL-MH2p | hPSAM17.1VL-CK | 22 | 92.77 |
| | hPSMA17.1VH-CH1- | | | | |
| | hinge-CH2—CH3 | | | | |
| NBDV002 | TPP3956VL-MH2n- | TPP3956VH-MH2p | hPSAM17.1VL-CK | 13.6 | 94.6 |
| | hPSMA17.1VH-CH1- | | | | |
| | hinge-CH2—CH3 | | | | |
| NBDV003 | TPP3956VL-CK- | TPP3956VH-CH1 | hPSAM17.1VL-CK | 28 | 68.52 |
| | hPSMA17.1VH-CH1- | | | | |
| | hinge-CH2—CH3 | | | | |

TABLE 23
Antibody Variable Domains Used To Build IgG-Like Molecules Containing
MH2 Domains

| Antibody | | Variable Domain Sequence |
|---|---|---|
| Target | Domain | 12345678901234567890123456789012345678901234567890 |
| STEAP1 | STEAP1 | EVQLVESGGGVVQPGRSLRLSCVASGFPFNNYWMTWIRQAPGKGLEWIAS |
| (TPP3956) | (TPP3956) | ITITGGTTYYPGSVKGRFTISRDNSKSTLYLQMNSLRAEDTAVYYCTRER |
| | VH | YSTEYYPYYWYFDFWGQGTMVTVSS (SEQ ID NO: 294) |
| | STEAP1 | DIQMTQSPSSLSASVGDRVTITCRTSQDIGNYLRWFQQKPGKSPKLMIYD |
| | (TPP3956) | AINLAAGVPSRFSGSGSGTDYTLTISSLQPEDVATYYCLQHNEYPYTFGQ |
| | VK | GTKLEIK (SEQ ID NO: 295) |
| PSMA | PSMA | EVQLVQSGAEVKKPGSSVKVSCKASGYTFTDYYMNWVKQAPGKGLEWIGL |
| (hPSMA17. | (hPSMA17. | INPNSGGINYNQKFKVKATLTVDKSTSTAYMELSSLRSEDTAVYYCARRD |
| 1) | 1) VH | YGTSGDYWGQGTTVTVSS (SEQ ID NO: 296) |
| | PSMA | DIQMTQSPSSLSASVGDRVTITCHASQNINVWLSWYQQKPGKAPKLLIYK |
| | (hPSMA17. | ASNLHTGVPSRFSGSGSGTDFTLTISSLQPEDFATYYCQQGQSYPLTFGQ |
| | 1) VK | GTKLEIK (SEQ ID NO: 297) |

TABLE 24
Sequences Of Generated Duo-Fab-Ig Molecules

| Duo- | | Sequence | SEQ ID |
|---|---|---|---|
| Fab-Ig | Chain | 12345678901234567890123456789012345678901234567890 | NO: |
| NBDV001 | Chain 1 | EVQLVESGGGVVQPGRSLRLSCVASGFPFNNYWMTWIRQAPGKGLEWIAS | 298 |
| | | ITITGGTTYYPGSVKGRFTISRDNSKSTLYLQMNSLRAEDTAVYYCTRER | |
| | | YSTEYYPYYWYFDFWGQGTMVTVSSVIAELPPKVSVFVPPRDGFFGNPRK | |
| | | SELICEATGFSPRQIQVSWLREGKQVGSGVTTDQVQAEAKESGPTTYDVT | |
| | | STLTIKESDWLGQSMFTCRVDHRGLTFQQNASSMCGGEVQLVQSGAEVKK | |
| | | PGSSVKVSCKASGYTFTDYYMNWVKQAPGKGLEWIGLINPNSGGINYNQK | |
| | | FKVKATLTVDKSTSTAYMELSSLRSEDTAVYYCARRDYGTSGDYWGQGTT | |
| | | VTVSSASTKGPSVFPLAPSSKSTSGGTAALGCLVKDYFPEPVTVSWNSGA | |
| | | LTSGVHTFPAVLQSSGLYSLSSVVTVPSSSLGTQTYICNVNHKPSNTKVD | |
| | | KKVEPKSCDKTHTCPPCPAPEAAGGPSVFLFPPKPKDTLMISRTPEVTCV | |
| | | VVDVSHEDPEVKFNWYVDGVEVHNAKTKPREEQYNSTYRVVSVLTVLHQD | |
| | | WLNGKEYKCKVSNKALPAPIEKTISKAKGQPREPQVYTLPPSREEMTKNQ | |
| | | VSLTCLVKGFYPSDIAVEWESNGQPENNYKTTPPVLDSDGSFFLYSKLTV | |
| | | DKSRWQQGNVFSCSVMHEALHNHYTQKSLSLSPGK | |
| | Chain 2 | DIQMTQSPSSLSASVGDRVTITCRTSQDIGNYLRWFQQKPGKSPKLMIYD | 299 |
| | | AINLAAGVPSRFSGSGSGTDYTLTISSLQPEDVATYYCLQHNEYPYTFGQ | |
| | | GTKLEIKVIAELPPKVSVFVPPRDGFFGNPRKSKLICKATGFSPRQIQVS | |
| | | WLREGKQVGSGVTTKQVQAEAKESGPTTYKVTSTLTIKESDWLGQSMFTC | |
| | | RVDHRGLTFQQNASSMC | |
| | Chain 3 | DIQMTQSPSSLSASVGDRVTITCHASQNINVWLSWYQQKPGKAPKLLIYK | 300 |
| | | ASNLHTGVPSRFSGSGSGTDFTLTISSLQPEDFATYYCQQGQSYPLTFGQ | |
| | | VGTKLEIKRTVAAPSVFIFPPSDEQLKSGTASVVCLLNNFYPREAKVQWKV | |
| | | DNALQSGNSQESVTEQDSKDSTYSLSSTLTLSKADYEKHKVYACEVTHQG | |
| | | LSSPVTKSFNRGEC | |
| NBDV002 | Chain 1 | DIQMTQSPSSLSASVGDRVTITCRTSQDIGNYLRWFQQKPGKSPKLMIYD | 301 |
| | | AINLAAGVPSRFSGSGSGTDYTLTISSLQPEDVATYYCLQHNEYPYTFGQ | |
| | | GTKLEIKVIAELPPKVSVFVPPRDGFFGNPRKSELICEATGFSPRQIQVS | |
| | | WLREGKQVGSGVTTDQVQAEAKESGPTTYDVTSTLTIKESDWLGQSMFTC | |
| | | RVDHRGLTFQQNASSMCGGEVQLVQSGAEVKKPGSSVKVSCKASGYTFTD | |
| | | YYMNWVKQAPGKGLEWIGLINPNSGGINYNQKFKVKATLTVDKSTSTAYM | |
| | | ELSSLRSEDTAVYYCARRDYGTSGDYWGQGTTVTVSSASTKGPSVFPLAP | |
| | | SSKSTSGGTAALGCLVKDYFPEPVTVSWNSGALTSGVHTFPAVLQSSGLY | |
| | | SLSSVVTVPSSSLGTQTYICNVNHKPSNTKVDKKVEPKSCDKTHTCPPCP | |
| | | APEAAGGPSVFLFPPKPKDTLMISRTPEVTCVVVDVSHEDPEVKFNWYVD | |
| | | GVEVHNAKTKPREEQYNSTYRVVSVLTVLHQDWLNGKEYKCKVSNKALPA | |
| | | PIEKTISKAKGQPREPQVYTLPPSREEMTKNQVSLTCLVKGFYPSDIAVE | |
| | | WESNGQPENNYKTTPPVLDSDGSFFLYSKLTVDKSRWQQGNVFSCSVMHE | |
| | | ALHNHYTQKSLSLSPGK | |
| | Chain 2 | EVQLVESGGGVVQPGRSLRLSCVASGFPFNNYWMTWIRQAPGKGLEWIAS | 302 |
| | | ITITGGTTYYPGSVKGRFTISRDNSKSTLYLQMNSLRAEDTAVYYCTRER | |
| | | YSTEYYPYYWYFDFWGQGTMVTVSSVIAELPPKVSVFVPPRDGFFGNPRK | |
| | | SKLICKATGFSPRQIQVSWLREGKQVGSGVTTKQVQAEAKESGPTTYKVT | |
| | | STLTIKESDWLGQSMFTCRVDHRGLTFQQNASSMC | |
| | Chain 3 | DIQMTQSPSSLSASVGDRVTITCHASQNINVWLSWYQQKPGKAPKLLIYK | 303 |
| | | ASNLHTGVPSRFSGSGSGTDFTLTISSLQPEDFATYYCQQGQSYPLTFGQ | |
| | | GTKLEIKRTVAAPSVFIFPPSDEQLKSGTASVVCLLNNFYPREAKVQWKV | |
| | | DNALQSGNSQESVTEQDSKDSTYSLSSTLTLSKADYEKHKVYACEVTHQG | |
| | | LSSPVTKSFNRGEC | |
| NBDV003 | Chain 1 | DIQMTQSPSSLSASVGDRVTITCRTSQDIGNYLRWFQQKPGKSPKLMIYD | 304 |
| | | AINLAAGVPSRFSGSGSGTDYTLTISSLQPEDVATYYCLQHNEYPYTFGQ | |
| | | GTKLEIKRTVAAPSVFIFPPSDEQLKSGTASVVCLLNNFYPREAKVQWKV | |
| | | DNALQSGNSQESVTEQDSKDSTYSLSSTLTLSKADYEKHKVYACEVTHQG | |
| | | LSSPVTKSFNRGECGGEVQLVQSGAEVKKPGSSVKVSCKASGYTFTDYYM | |
| | | NWVKQAPGKGLEWIGLINPNSGGINYNQKFKVKATLTVDKSTSTAYMELS | |
| | | SLRSEDTAVYYCARRDYGTSGDYWGQGTTVTVSSASTKGPSVFPLAPSSK | |
| | | STSGGTAALGCLVKDYFPEPVTVSWNSGALTSGVHTFPAVLQSSGLYSLS | |
| | | SVVTVPSSSLGTQTYICNVNHKPSNTKVDKKVEPKSCDKTHTCPPCPAPE | |
| | | AAGGPSVFLFPPKPKDTLMISRTPEVTCVVVDVSHEDPEVKFNWYVDGVE | |
| | | VHNAKTKPREEQYNSTYRVVSVLTVLHQDWLNGKEYKCKVSNKALPAPIE | |
| | | KTISKAKGQPREPQVYTLPPSREEMTKNQVSLTCLVKGFYPSDIAVEWES | |
| | | NGQPENNYKTTPPVLDSDGSFFLYSKLTVDKSRWQQGNVFSCSVMHEALH | |
| | | NHYTQKSLSLSPGK | |
| | Chain 2 | EVQLVESGGGVVQPGRSLRLSCVASGFPFNNYWMTWIRQAPGKGLEWIAS | 305 |
| | | ITITGGTTYYPGSVKGRFTISRDNSKSTLYLQMNSLRAEDTAVYYCTRER | |
| | | YSTEYYPYYWYFDFWGQGTMVTVSSASTKGPSVFPLAPSSKSTSGGTAAL | |
| | | GCLVKDYFPEPVTVSWNSGALTSGVHTFPAVLQSSGLYSLSSVVTVPSSS | |
| | | LGTQTYICNVNHKPSNTKVDKKVEPKSC | |
| | Chain 3 | DIQMTQSPSSLSASVGDRVTITCHASQNINVWLSWYQQKPGKAPKLLIYK | 306 |
| | | ASNLHTGVPSRFSGSGSGTDFTLTISSLQPEDFATYYCQQGQSYPLTFGQ | |
| | | GTKLEIKRTVAAPSVFIFPPSDEQLKSGTASVVCLLNNFYPREAKVQWKV | |
| | | DNALQSGNSQESVTEQDSKDSTYSLSSTLTLSKADYEKHKVYACEVTHQG | |
| | | LSSPVTKSFNRGEC | |

[0190] Duo-Fab-Ig molecules were tested in a FACS binding assay to confirm that they retained binding affinity to STEAP1 and PSMA. The parental anti-STEAP1 antibody TPP3956 and anti-PSMA hPSMA17.1 were also tested for comparison. 293/PSMA cells were used for testing PSMA binding. 293/STEAP1 cells were used for testing STEAP1 binding. LnCap cells were used for testing the combination binding to PSMA/STEAP1. Cells were incubated with different concentrations of antibodies for 30 minutes and then incubated with incubated with fluorescence-conjugated secondary antibodies for another 30 minutes. Cells were then analyzed by flow cytometry and data was analyzed using FlowJo software. As shown in FIG. 22B, Duo-Fab-Igs maintained binding affinity to both targets comparable to their parental antibodies. The Duo-Fab-Igs showed enhanced binding on LnCap cells which has both PSMA and STEAP1 expressed on the cell surface. DVD889 [hu IgG1/k] was used as a negative control.

### Example 14: Analytical Methods and Techniques for Bispecific Molecules Characterizations

### Example 14.1: Size Exclusion Chromatography (SEC)

[0191] Bispecific molecules were separated on an SEC column based on protein dynamic size (Instrument: Dionex HPLC; Column: TOSOH, TSKgel G3000sw ×L, CN#08541; Buffer: 0.1M sodium phosphate buffer, 0.1 sodium sulfide, pH6.8; UV280: monitor proteins at UV 280 nm; Flow rate: 1.0 mL/minute, isocratic). The molecular weights of desired bispecific molecule BMH1, BMH2, BMH3, BMH4, and BMH5 were about 150 kDa. After protein A purification, the molecular profiles of BMH1, BMH2, BMH3, BMH4, and BMH5 were analyzed by SEC

### Example 14.2: Hydrophobic Interaction Chromatography (HIC)

[0192] Bispecific molecules were separated on an HIC column based on protein hydrophobicity (Instrument: Dionex HPLC; Column: TOSOH, TSKgel G3000sw xL, CN#08541; Buffer A: 1.8M ammonia sulfide, 20 mM phosphate buffer, pH7.2; Buffer B: 20 mM phosphate buffer, pH7.2; UV280: monitor proteins at UV 280 nm; Flow rate: 1.0 mL/minute; Gradient: 0% to 17% buffer B in 17 minutes, 100% buffer for 3 minutes, and back to 100% buffer A for 7 minutes).

### Example 14.3: Isoelectric Focusing (iCE3)

[0193] Bispecific molecules were separated on an HIC column based on isoelectric point (pI) and hydrodynamic charge (Instrument: ProteinSimple iCE3; Capillary: ProteinSimple, PN#101700; Chemicals: ProteinSimple: 0.5% Methyl Cellulose (PN#102505), iCE electrolyte kit (PN#102506), 1% Methyl Cellulose (PN#101876), Pharmalyte (PN#17-0456-01) and pI markers; Instrument conditions: focusing time: 8 minutes; UV280: monitor proteins at UV 280 nm).

### Example 14.4: Mass Spectrometry (MS)

[0194] Bispecific molecular weight and identification was determined by mass spec (MS) (Instrument: Agilent HPLC-TOF or HPLC-QTOF; Column: Vydac C4, CN#214MS5115, and CapTrap cartridge; Buffer A: 0.1% FA+0.01% TFA in H2O, buffer B: 0.1% FA+0.01% TFA in CAN; Flow rate: 50 μL/minute; Gradient: 5% buffer B for 5 minutes, 28% to 50% buffer B in 10 minutes, 50% to 95% buffer B in 10 minutes and back to 5% buffer B for 3 minutes for C4 column. 5% buffer B for 7 minutes, 100% buffer B for 7 minutes and back to 5% buffer B for 5 minutes for CapTrap cartridge; MS conditions: For reduced protein: gas temperature 350 C, drying gas 12 L/min, nebulizer 60 psg, fragmentor 350v, skimmer 75v, OCTI RF Vpp 750v, Vcap 5000v. For intact protein: gas temperature 300 C, drying gas 12 L/min, nebulizer 60 psg, fragmentor 350v, skimmer 85v, OCTI RF Vpp 750v, Vcap 5500v).

### Example 15: Generation of IgG-Like Molecules with MH2 Domains

[0195] Additional bivalent monospecific molecules with CH1/Cκ replaced by MH2n/MH2p can be constructed using variable domains known in the art. Table 25 summarizes exemplary variable domain sequences that can be used for constructing IgG-like molecules containing MH2 domains. Exemplary bivalent monospecific molecules comprising the variable domains listed in Table 25 are shown in Table 26. Table 26 also shows an exemplary halfbody that can be constructed by using the variable domains of cetuximab.

TABLE 25
Exemplary Antibody Variable Domains That Can Be Used To Build IgG-Like
Molecules Containing MH2 Domains

| Antibody | | Variable Domain Sequence | SEQ ID |
|---|---|---|---|
| Target | Domain | 1234567890123456789012345678901234567890 | NO: |
| EGFR | Cetuximab | QVQLKQSGPGLVQPSQSLSITCTVSGFSLTNYGVHWVRQS | 307 |
| (Cetuximab) | VH | PGKGLEWLGVIWSGGNTDYNTPFTSRLSINKDNSKSQVFF | |
| | | KMNSLQSNDTAIYYCARALTYYDYEFAYWGQGTLVTVSA | |
| | Cetuximab | DILLTQSPVILSVSPGERVSFSCRASQSIGTNIHWYQQRT | 308 |
| | VK | NGSPRLLIKYASESISGIPSRFSGSGSGTDFTLSINSVES | |
| | | EDIADYYCQQNNNWPTTFGAGTKLELK | |
| HER2 | Herceptin | EVQLVESGGGLVQPGGSLRLSCAASGFNIKDTYIHWVRQA | 309 |
| (Herceptin) | VH | PGKGLEWVARIYPTNGYTRYADSVKGRFTISADTSKNTAY | |
| | | LQMNSLRAEDTAVYYCSRWGGDGFYAMDYWGQGTLVTVSS | |
| | Herceptin | DIQMTQSPSSLSASVGDRVTITCRASQDVNTAVAWYQQKP | 310 |
| | VK | GKAPKLLIYSASFLYSGVPSRFSGSRSGTDFTLTISSLQP | |
| | | EDFATYYCQQHYTTPPTFGQGTKVEIK | |

TABLE 26
Sequences of Exemplary Bivalent Monospecific Molecules and Halfbody

| Mono- | | |
|---|---|---|
| Specific | | Sequence |
| Molecules | Chain | 12345678901234567890123456789012345678901234567890 |
| MMH1 | Herceptin VH- | EVQLVESGGGLVQPGGSLRLSCAASGFNIKDTYIHWVRQAPGKGLEWVAR |
| | linker-MH2- | IYPTNGYTRYADSVKGRFTISADTSKNTAYLQMNSLRAEDTAVYYCSRWG |
| | hinge-CH2-CH3 | GDGFYAMDYWGQGTLVTVSSASTELPPKVSVFVPPRDGFFGNPRKSKLIC |
| | | QATGFSPRQIQVSWLREGKQVGSGVTTDQVQAEAKESGPTTYKVTSTLTI |
| | | KESDWLGQSMFTCPVDHRGLTFQQNASSMCDKTHTCPPCPAPELLGGPSV |
| | | FLFPPKPKDTLMISRTPEVTCVVVDVSHEDPEVKFNWYVDGVEVENAKTK |
| | | PREEQYNSTYRVVSVLTVLHQDWLNGKEYKCKVSNKALPAPIEKTISKAK |
| | | GQPREPQVYTLPPSREEMTKNQVSLTCLVKGFYPSDIAVEWESNGQPENN |
| | | YKTTPPVLDSDGSFFLYSKLTVDKSRWQQGNVFSCSVMHEALHNHYTQKS |
| | | LSLSPGK (SEQ ID NO: 311) |
| | Herceptin VK- | DIQMTQSPSSLSASVGDRVTITCRASQDVNTAVAWYQQKPGKAPKLLIYS |
| | linker-MH2 | ASFLYSGVPSRFSGSRSGTDFTLTISSLQPEDHATYYCQQHYTTPPTFGQ |
| | | GTKVEIKRTAELPPKVSVFVPPRDGFFGNPRKSKLICQATGFSPRQIQVS |
| | | WLREGKQVGSGVTTDQVQAEAKESGPTTYKVTSTLTIKESDWLGQSMFTC |
| | | RVDHRGLTFQQNASSMC (SEQ ID NO: 312) |
| MMH2 | Herceptin VH- | EVQLVESGGGLVQPGGSLRLSCAASGFNIKDTYIHWVRQAPGKGLEWVAR |
| | linker-MH2p- | IYPTNGYTRYADSVKGRFTISADTSKNTAYLQMNSLRAEDTAVYYCSRWG |
| | hinge-CH2-CH3 | GDGFYAMDYWGQGTLVTVSSASTELPPKVSVFVPPPDGFFGNPRKSKLIC |
| | | KATGFSPRQIQVSWLREGKQVGSGVTTKQVQAEAKESGPTTYKVTSTLTI |
| | | KESDWLGQSMFTCRVDHRGLTFQQNASSMCDKTHTCPPCPAPELLGGPSV |
| | | FLFPPKPKDTLMISRTPEVTCVVVDVSHEDPEVKFNWYVDGVEVHNAKTK |
| | | PREEQYNSTYRVVSVLTVLHQDWLNGKEYKCKVSNKALPAPIEKTISKAK |
| | | GQPREPQVYTLPPSREEMTKNQVSLTCLVKGFYPSDIAVEWESNGQPENN |
| | | YKTTPPVLDSDGSFFLYSKLTVDKSRWQQGNVFSCSVMHEALHNHYTQKS |
| | | LSLSPGK (SEQ ID NO: 313) |
| | Herceptin- | DIQMTQSPSSLSASVGDRVTITCRASQDVNTAVAWYQQKPGKAPKLLIYS |
| | linker-MH2n | ASFLYSGVPSRFSGSPSGTDFTLTISSLQPEDFATYYCQQHYTTPPTFGQ |
| | | GTKVEIKPTAELPPKVSVFVPPRDGFFGNPRKSELICEATGFSPRQIQVS |
| | | WLREGKQVGSGVTTDQVQAEAKESGPTTYDVTSTLTIKESDWLGQSMFTC |
| | | RVDHRGLTFQQNASSMC (SEQ ID NO: 314) |
| MMH3 | Herceptin VH- | EVQLVESGGGLVQPGGSLRLSCAASGFNIKDTYIHWVRQAPGKGLEWVAR |
| | linker-MH2h- | IYPTNGYTRYADSVKGRFTISADTSKNTAYLQMNSLRAEDTAVYYCSRWG |
| | hinge-CH2-CH3 | GDGFYAMDYWGQGTLVTVSSASTELPPKVSVFVPPRDGFFGNPRKSKLAC |
| | | SATGFSPRQIQVSWLREGKQVGSGVTTDQVQAEAKESGPTTYKVASTLTI |
| | | KESDWLGQSMFTCRVDHRGLTFQQNASSMCDKTHTCPPCPAPELLGGPSV |
| | | FLFPPKPKDTLMISRTPEVTCVVVDVSHEDPEVKFNWYVDGVEVHNAKTK |
| | | PREEQYNSTYRVVSVLTVLHQDWLNGKEYKCKVSNKALPAPIEKTISKAK |
| | | GQPREPQVYTLPPSREEMTKNQVSLTCLVKGFYPSDIAVEWESNGQPENN |
| | | YKTTPPVLDSDGSFFLYSKLTVDKSRWQQGNVFSCSVMHEALHNHYTQKS |
| | | LSLSPGK (SEQ ID NO: 315) |
| | Herceptin VK- | DIQMTQSPSSLSASVGDRVTITCRASQDVNTAVAWYQQKPGKAPKLLIYS |
| | linker-MH2k | ASFLYSGVPSRFSGSRSGTDFTLTISSLQPEDFATYYCQQHYTTPPTFGQ |
| | | GTKVEIKRTAELPPKVSVFVPPRDGFFGNPRKSKLWCQATGFSPRQIQVS |
| | | WLREGKQVGSGVTTDQVQAEAKESGPTTYKVTSTLTIKESDWLGQSMFTC |
| | | RVDHRGLTFQQNASSMC (SEQ. ID NO: 316) |
| MMH4 | Herceptin VH- | EVQLVESGGGLVQPGGSLRLSCAASGFNIKDTYIHWVRQAPGKGLEWVAR |
| | linker-MH2n- | IYPTNGYTRYADSVKGRFTISADTSKNTAYLQMNSLRAEDTAVYYCSRWG |
| | hinqe-CH2-CH3 | GDGFYAMDYWGQGTLVTVSSASTELPPKVSVFVPPRDGFFGNPRKSELIC |
| | | EATGFSPRQIQVSWLREGKQVGSGVTTDQVQAEAKESGPTTYDVTSTLTI |
| | | KESDWLGQSMFTCRVDHRGLTFQQNASSMCDKTHTCPPCPAPELLGGPSV |
| | | FLFPPKPKDTLMISRTPEVTCVVVDVSHEDPEVKFNWYVDGVEVHNAKTK |
| | | PREEQYNSTYRVVSVLTVLHQDWLNGKEYKCKVSNKALPAPIEKTISKAK |
| | | GQPREPQVYTLPPSREEMTKNQVSLTCLVKGFYPSDIAVEWESNGQPENN |
| | | YKTTPPVLDSDGSFFLYSKLTVDKSRWQQGNVFSCSVMHEALHNHYTQKS |
| | | LSLSPGK (SEQ ID NO: 317) |
| | Herceptin VK | DIQMTQSPSSLSASVGDRVTITCRASQDVNTAVAWYQQKPGKAPKLLIYS |
| | linker-MH2p | ASFLYSGVPSRFSGSRSGTDFTLTISSLQPEDFATYYCQQHYTTPPTFGQ |
| | | GTKVEIKRTAELPPKVSVFVPPRDGFFGNPRKSKLICKATGFSPRQIQVS |
| | | WLREGKQVGSGVTTKQVQAEAKESGPTTYKVTSTLTIKESDWLGQSMFTC |
| | | RVDHRGLTFQQNASSMC (SEQ ID NO: 318) |
| MMH5 | Herceptin VH- | EVQLVESGGGLVQPGGSLRLSCAASGFNIKDTYIHWVPQAPGKGLENVAR |
| | linker-MH2k- | IYPTNGYTRYADSVKGRFTISADTSKNTAYLQMNSLRAEDTAVYYCSRWG |
| | hinge-CH2-CH3 | GDGFYAMDYWGQGTLVTVSSASTELPPKVSVFVPPRDGFFGNPRKSKLWC |
| | | QATGESPRQIQVSWLREGKQVGSGVTTDQVQAEAKESGPTTYKVTSTLTI |
| | | KESDWLGQSMFTCRVDHRGLTFQQNASSMCDKTHTCPPCPAPELLGGPSV |
| | | FLFPPKPKDTLMISRTPEVTCVVVDVSHEDPEVKFNWYVDGVEVHNAKTK |
| | | PREEQYNSTYRVVSVLTVLHQDWLNGKEYKCKVSNKALPAPIEKTISKAK |
| | | GQPREPQVYTLPPSREEMTKNQVSLTCLVKGFYPSDIAVEWESNGQPENN |
| | | YKTTPPVLDSDGSFFLYSKLTVDKSRWQQGNVFSCSVMHEALHNHYTQKS |
| | | LSLSPGK (SEQ ID NO: 319) |
| | Herceptin VH | DIQMTQSPSSLSASVGDRVTITCRASQDVNTAVAWYQQKPGKAPKLLIYS |
| | linker-MH2h | ASFLYSGVPSRFSGSRSGTDFTLTISSLQPEDFATYYCQQHYTTPPTFGQ |
| | | GTKVEIKRTAELPPKVSVFVPPRDGFFGNPRKSKLACSATGFSPRQIQVS |
| | | WLREGKQVGSGVTTDQVQAEAKESGPTTYKVASTLTIKESDWLGQSMFTC |
| | | RVDHRGLTFQQNASSMC (SEQ ID NO: 320) |
| Half- | Cetuximab-VH- | QVQLKQSGPGLVQPSQSLSITCTVSGFSLTNYGVHWVRQSPGKGLEWLGV |
| EGFR | CT1-hinge- | IWSGGNTDYNTPFTSRLSINKDNSKSQVFFKMNSLQSNDTAIYYCARALT |
| | CH2-CH3 | YYDYEFAYWGQGTLVTVSAASTKGPSVFPLAPSSKSTSGGTAALGCLVKD |
| | (halfbody) | YFPEPVTVSWNSGALTSGVHTFPAVLQSSGLYSLSSVVTVPSSSLGTQTY |
| | | ICNVNHKPSNTKVDKKVEPKSCDKTHTSPPSPAPELLGGPSVFLFPPKPK |
| | | DTLMISRTPEVTCVVVDVSHEDPEVKFNWYVDGVEVHNAKTKPREEQYNS |
| | | TYRVVSVLTVLHQDWLNGKEYKCKVSNKALPAPIEKTISKAKGQPREPQV |
| | | YTLPPSREEMTKNQVSLTCLVKGFYPSDIAVEWESNGQPENNYKTTPPVL |
| | | DSDGSFRLYSKLTVDKSPWQQGNVFSCSVMHEALHNHYTQKSLSLSPGK |
| | | (SEQ ID NO: 321) |
| | Cetuximab-VK- | DILLTQSPVILSVSPGERVSFSCRASQSIGTNIHWYQQRTNGSPRLLIKY |
| | CK | ASESISGIPSRFSGSGSGTDFTLSINSVESEDIADYYCQQNNNWPTTFGA |
| | | GTKLELKRTVAAPSVFIFPPSDEQLKSGTASVVCLLNNFYPREAKVQWKV |
| | | DNALQSGNSQESVTEQDSKDSTYSLSSTLTLSKADYEKHKVYACEVTHQG |
| | | LSSPVTKSFNRGEC (SEQ ID NO: 322) |

### INCORPORATION BY REFERENCE

[0196] The contents of all cited references (including literature references, patents, patent applications, and websites) that may be cited throughout this application are hereby expressly incorporated by reference in their entirety for any purpose, as are the references cited therein. Where a reference expressly or inherently contradicts anything in the present disclosure, the disclosure will control.

### EQUIVALENTS

[0197] The disclosure may be embodied in other specific forms without departing from the spirit or essential characteristics thereof. The foregoing embodiments are therefore to be considered in all respects illustrative rather than limiting of the disclosure. Scope of the disclosure is thus indicated by the appended claims rather than by the foregoing description, and all changes that come within the meaning and range of equivalency of the claims are therefore intended to be embraced herein.

The application's sequence listing, which the Patent Office published only in electronic form, follows.

SEQUENCE LISTING (348 sequences)

SEQ ID NO: 1 - protein, 16 aa, Artificial Sequence
  source: /note="Description of Artificial Sequence: Synthetic peptide"
AKTTPKLEEGEFSEAR

SEQ ID NO: 2 - protein, 17 aa, Artificial Sequence
  source: /note="Description of Artificial Sequence: Synthetic peptide"
AKTTPKLEEGEFSEARV

SEQ ID NO: 3 - protein, 9 aa, Artificial Sequence
  source: /note="Description of Artificial Sequence: Synthetic peptide"
AKTTPKLGG

SEQ ID NO: 4 - protein, 10 aa, Artificial Sequence
  source: /note="Description of Artificial Sequence: Synthetic peptide"
SAKTTPKLGG

SEQ ID NO: 5 - protein, 6 aa, Artificial Sequence
  source: /note="Description of Artificial Sequence: Synthetic peptide"
SAKTTP

SEQ ID NO: 6 - protein, 6 aa, Artificial Sequence
  source: /note="Description of Artificial Sequence: Synthetic peptide"
RADAAP

SEQ ID NO: 7 - protein, 9 aa, Artificial Sequence
  source: /note="Description of Artificial Sequence: Synthetic peptide"
RADAAPTVS

SEQ ID NO: 8 - protein, 12 aa, Artificial Sequence
  source: /note="Description of Artificial Sequence: Synthetic peptide"
RADAAAAGGPGS

SEQ ID NO: 9 - protein, 27 aa, Artificial Sequence
  source: /note="Description of Artificial Sequence: Synthetic peptide"
RADAAAAGGGGSGGGGSGGGGSGGGGS

SEQ ID NO: 10 - protein, 18 aa, Artificial Sequence
  source: /note="Description of Artificial Sequence: Synthetic peptide"
SAKTTPKLEEGEFSEARV

SEQ ID NO: 11 - protein, 5 aa, Artificial Sequence
  source: /note="Description of Artificial Sequence: Synthetic peptide"
ADAAP

SEQ ID NO: 12 - protein, 12 aa, Artificial Sequence
  source: /note="Description of Artificial Sequence: Synthetic peptide"
ADAAPTVSIFPP

SEQ ID NO: 13 - protein, 5 aa, Artificial Sequence
  source: /note="Description of Artificial Sequence: Synthetic peptide"
TVAAP

SEQ ID NO: 14 - protein, 12 aa, Artificial Sequence
  source: /note="Description of Artificial Sequence: Synthetic peptide"
TVAAPSVFIFPP

SEQ ID NO: 15 - protein, 6 aa, Artificial Sequence
  source: /note="Description of Artificial Sequence: Synthetic peptide"
QPKAAP

SEQ ID NO: 16 - protein, 13 aa, Artificial Sequence
  source: /note="Description of Artificial Sequence: Synthetic peptide"
QPKAAPSVTLFPP

SEQ ID NO: 17 - protein, 6 aa, Artificial Sequence
  source: /note="Description of Artificial Sequence: Synthetic peptide"
AKTTPP

SEQ ID NO: 18 - protein, 13 aa, Artificial Sequence
  source: /note="Description of Artificial Sequence: Synthetic peptide"
AKTTPPSVTPLAP

SEQ ID NO: 19 - protein, 6 aa, Artificial Sequence
  source: /note="Description of Artificial Sequence: Synthetic peptide"
AKTTAP

SEQ ID NO: 20 - protein, 13 aa, Artificial Sequence
  source: /note="Description of Artificial Sequence: Synthetic peptide"
AKTTAPSVYPLAP

SEQ ID NO: 21 - protein, 6 aa, Artificial Sequence
  source: /note="Description of Artificial Sequence: Synthetic peptide"
ASTKGP

SEQ ID NO: 22 - protein, 13 aa, Artificial Sequence
  source: /note="Description of Artificial Sequence: Synthetic peptide"
ASTKGPSVFPLAP

SEQ ID NO: 23 - protein, 15 aa, Artificial Sequence
  source: /note="Description of Artificial Sequence: Synthetic peptide"
GGGGSGGGGSGGGGS

SEQ ID NO: 24 - protein, 15 aa, Artificial Sequence
  source: /note="Description of Artificial Sequence: Synthetic peptide"
GENKVEYAPALMALS

SEQ ID NO: 25 - protein, 15 aa, Artificial Sequence
  source: /note="Description of Artificial Sequence: Synthetic peptide"
GPAKELTPLKEAKVS

SEQ ID NO: 26 - protein, 15 aa, Artificial Sequence
  source: /note="Description of Artificial Sequence: Synthetic peptide"
GHEAAAVMQVQYPAS

SEQ ID NO: 27 - protein, 24 aa, Artificial Sequence
  source: /note="Description of Artificial Sequence: Synthetic peptide"
TVAAPSVFIFPPTVAAPSVFIFPP

SEQ ID NO: 28 - protein, 26 aa, Artificial Sequence
  source: /note="Description of Artificial Sequence: Synthetic peptide"
ASTKGPSVFPLAPASTKGPSVFPLAP

SEQ ID NO: 29 - protein, 10 aa, Artificial Sequence
  source: /note="Description of Artificial Sequence: Synthetic peptide"
GGGGSGGGGS

SEQ ID NO: 30 - protein, 9 aa, Artificial Sequence
  source: /note="Description of Artificial Sequence: Synthetic peptide"
GGSGGGGSG

SEQ ID NO: 31 - protein, 5 aa, Artificial Sequence
  source: /note="Description of Artificial Sequence: Synthetic peptide"
GGGGS

SEQ ID NO: 32 - protein, 15 aa, Homo sapiens
EPKSCDKTHTCPPCP

SEQ ID NO: 33 - protein, 10 aa, Homo sapiens
DKTHTCPPCP

SEQ ID NO: 34 - protein, 107 aa, Unknown
  source: /note="Description of Unknown: wild type or engineered sequence"
ELPPKVSVFVPPRDGFFGNPRKSKLICQATGFSPRQIQVSWLREGKQVGSGVTTDQVQAEAKESGPTTYKVTSTLTIKESDWLGQSMFTCRVDHRGLTFQQNASSMC

SEQ ID NO: 35 - protein, 107 aa, Unknown
  source: /note="Description of Unknown: wild type or engineered sequence"
ELPPKVSVFVPPRDGFFGNPRKSKLICKATGFSPRQIQVSWLREGKQVGSGVTTKQVQAEAKESGPTTYKVTSTLTIKESDWLGQSMFTCRVDHRGLTFQQNASSMC

SEQ ID NO: 36 - protein, 107 aa, Unknown
  source: /note="Description of Unknown: wild type or engineered sequence"
ELPPKVSVFVPPRDGFFGNPRKSELICEATGFSPRQIQVSWLREGKQVGSGVTTDQVQAEAKESGPTTYDVTSTLTIKESDWLGQSMFTCRVDHRGLTFQQNASSMC

SEQ ID NO: 37 - protein, 107 aa, Unknown
  source: /note="Description of Unknown: wild type or engineered sequence"
ELPPKVSVFVPPRDGFFGNPRKSKLWCQATGFSPRQIQVSWLREGKQVGSGVTTDQVQAEAKESGPTTYKVTSTLTIKESDWLGQSMFTCRVDHRGLTFQQNASSMC

SEQ ID NO: 38 - protein, 107 aa, Unknown
  source: /note="Description of Unknown: wild type or engineered sequence"
ELPPKVSVFVPPRDGFFGNPRKSKLACSATGFSPRQIQVSWLREGKQVGSGVTTDQVQAEAKESGPTTYKVASTLTIKESDWLGQSMFTCRVDHRGLTFQQNASSMC

SEQ ID NO: 39 - protein, 107 aa, Unknown
  source: /note="Description of Unknown: wild type or engineered sequence"
ELPPKVSVFVPPRDGFFGNPRKSKLICQATGFSPRQIQVSWLREGKQVGSGVTTDQVQAEAKESGPTTYKVTSTLTIKESDWLGQSMFTCRVDHRGLTFQQSASSMC

SEQ ID NO: 40 - protein, 107 aa, Unknown
  source: /note="Description of Unknown: wild type or engineered sequence"
ELPPKVSVFVPPRDGFFGNPRKSKLICKATGFSPRQIQVSWLREGKQVGSGVTTKQVQAEAKESGPTTYKVTSTLTIKESDWLGQSMFTCRVDHRGLTFQQSASSMC

SEQ ID NO: 41 - protein, 107 aa, Unknown
  source: /note="Description of Unknown: wild type or engineered sequence"
ELPPKVSVFVPPRDGFFGNPRKSELICEATGFSPRQIQVSWLREGKQVGSGVTTDQVQAEAKESGPTTYDVTSTLTIKESDWLGQSMFTCRVDHRGLTFQQSASSMC

SEQ ID NO: 42 - protein, 107 aa, Unknown
  source: /note="Description of Unknown: wild type or engineered sequence"
ELPPKVSVFVPPRDGFFGNPRKSKLWCQATGFSPRQIQVSWLREGKQVGSGVTTDQVQAEAKESGPTTYKVTSTLTIKESDWLGQSMFTCRVDHRGLTFQQSASSMC

SEQ ID NO: 43 - protein, 107 aa, Unknown
  source: /note="Description of Unknown: wild type or engineered sequence"
ELPPKVSVFVPPRDGFFGNPRKSKLACSATGFSPRQIQVSWLREGKQVGSGVTTDQVQAEAKESGPTTYKVASTLTIKESDWLGQSMFTCRVDHRGLTFQQSASSMC

SEQ ID NO: 44 - protein, 98 aa, Unknown
  source: /note="Description of Unknown: wild type or engineered sequence"
ASTKGPSVFPLAPSSKSTSGGTAALGCLVKDYFPEPVTVSWNSGALTSGVHTFPAVLQSSGLYSLSSVVTVPSSSLGTQTYICNVNHKPSNTKVDKKV

SEQ ID NO: 45 - protein, 107 aa, Unknown [sequence omitted]

SEQ ID NO: 46 - protein, 110 aa, Unknown
  source: /note="Description of Unknown: wild type or engineered sequence"
APELLGGPSVFLFPPKPKDTLMISRTPEVTCVVVDVSHEDPEVKFNWYVDGVEVHNAKTKPREEQYNSTYRVVSVLTVLHQDWLNGKEYKCKVSNKALPAPIEKTISKAK

SEQ ID NO: 47 - protein, 110 aa, Unknown
  source: /note="Description of Unknown: wild type or engineered sequence"
APEAAGGPSVFLFPPKPKDTLMISRTPEVTCVVVDVSHEDPEVKFNWYVDGVEVHNAKTKPREEQYNSTYRVVSVLTVLHQDWLNGKEYKCKVSNKALPAPIEKTISKAK

SEQ ID NO: 48 - protein, 107 aa, Unknown
  source: /note="Description of Unknown: wild type or engineered sequence"
GQPREPQVYTLPPSREEMTKNQVSLTCLVKGFYPSDIAVEWESNGQPENNYKTTPPVLDSDGSFFLYSKLTVDKSRWQQGNVFSCSVMHEALHNHYTQKSLSLSPGK

SEQ ID NO: 49 - protein, 107 aa, Unknown
  source: /note="Description of Unknown: wild type or engineered sequence"
GQPREPQVYTLPPSREEMTKNQVSLWCLVKGFYPSDIAVEWESNGQPENNYKTTPPVLDSDGSFFLYSKLTVDKSRWQQGNVFSCSVMHEALHNHYTQKSLSLSPGK

SEQ ID NO: 50 - protein, 107 aa, Unknown
  source: /note="Description of Unknown: wild type or engineered sequence"
GQPREPQVYTLPPSREEMTKNQVSLSCAVKGFYPSDIAVEWESNGQPENNYKTTPPVLDSDGSFFLVSKLTVDKSRWQQGNVFSCSVMHEALHNHYTQKSLSLSPGK

SEQ ID NO: 51 - protein, 107 aa, Unknown
  source: /note="Description of Unknown: wild type or engineered sequence"
GQPREPQVYTLPPSREEMTKNQVSLTCLVKGFYPSDIAVEWESNGQPENNYKTTPPVLDSDGSFRLYSKLTVDKSRWQQGNVFSCSVMHEALHNHYTQKSLSLSPGK

SEQ ID NO: 52 - protein, 113 aa, Artificial Sequence
  source: /note="Description of Artificial Sequence: Synthetic polypeptide"
EVTLKESGPVLVKPTETLTLTCTVSGFSLTSFGVSWVRQPPGKGLEWIAAIWNSGRMDYNSALKSRLTISRDTSKSQVVLTMTNMDPVDTAMYFCARSGGSHWGQGTLVTVSS

SEQ ID NO: 53 - protein, 106 aa, Artificial Sequence
  source: /note="Description of Artificial Sequence: Synthetic polypeptide"
DIQMTQSPSSLSASVGDRVTITCKPSQNIDKYLNWYQQKPGKAPKRLIYNTNNLQTGIPSRFSGSGSGTEYTLTISSLQPEDFATYFCLQHRSGWTFGGGTKVEIK

SEQ ID NO: 54 - protein, 121 aa, Artificial Sequence [sequence omitted]

SEQ ID NO: 55 - protein, 107 aa, Artificial Sequence [sequence omitted]

SEQ ID NO: 56 - protein, 120 aa, Artificial Sequence [sequence omitted]

SEQ ID NO: 57 - protein, 107 aa, Artificial Sequence [sequence omitted]

SEQ ID NO: 58 - protein, 450 aa, Artificial Sequence
  source: /note="Description of Artificial Sequence: Synthetic polypeptide"
EVTLKESGPVLVKPTETLTLTCTVSGFSLTSFGVSWVRQPPGKGLEWIAAIWNSGRMDYNSALKSRLTISRDTSKSQVVLTMTNMDPVDTAMYFCARSGGSHWGQGTLVTVSSASTELPPKVSVFVPPRDGFFGNPRKSELICEATGFSPRQIQVSWLREGKQVGSGVTTDQVQAEAKESGPTTYDVTSTLTIKESDWLGQSMFTCRVDHRGLTFQQNASSMCDKTHTCPPCPAPEAAGGPSVFLFPPKPKDTLMISRTPEVTCVVVDVSHEDPEVKFNWYVDGVEVHNAKTKPREEQYNSTYRVVSVLTVLHQDWLNGKEYKCKVSNKALPAPIEKTISKAKGQPREPQVYTLPPSREEMTKNQVSLWCLVKGFYPSDIAVEWESNGQPENNYKTTPPVLDSDGSFFLYSKLTVDKSRWQQGNVFSCSVMHEALHNHYTQKSLSLSPGK

SEQ ID NO: 59 - protein, 216 aa, Artificial Sequence
  source: /note="Description of Artificial Sequence: Synthetic polypeptide"
DIQMTQSPSSLSASVGDRVTITCKPSQNIDKYLNWYQQKPGKAPKRLIYNTNNLQTGIPSRFSGSGSGTEYTLTISSLQPEDFATYFCLQHRSGWTFGGGTKVEIKRTAELPPKVSVFVPPRDGFFGNPRKSKLICKATGFSPRQIQVSWLREGKQVGSGVTTKQVQAEAKESGPTTYKVTSTLTIKESDWLGQSMFTCRVDHRGLTFQQNASSMC

SEQ ID NO: 60 - protein, 458 aa, Artificial Sequence
  source: /note="Description of Artificial Sequence: Synthetic polypeptide"
EVQLVESGGGLVQPGRSLRLSCAASGFTFDDYAMHWVRQAPGKGLEWVSAITWNSGHIDYADSVEGRFTISRDNAKNSLYLQMNSLRAEDTAVYYCAKVSYLSTASSLDYWGQGTLVTVSSASTELPPKVSVFVPPRDGFFGNPRKSELICEATGFSPRQIQVSWLREGKQVGSGVTTDQVQAEAKESGPTTYDVTSTLTIKESDWLGQSMFTCRVDHRGLTFQQNASSMCDKTHTCPPCPAPEAAGGPSVFLFPPKPKDTLMISRTPEVTCVVVDVSHEDPEVKFNWYVDGVEVHNAKTKPREEQYNSTYRVVSVLTVLHQDWLNGKEYKCKVSNKALPAPIEKTISKAKGQPREPQVYTLPPSREEMTKNQVSLWCLVKGFYPSDIAVEWESNGQPENNYKTTPPVLDSDGSFFLYSKLTVDKSRWQQGNVFSCSVMHEALHNHYTQKSLSLSPGK

SEQ ID NO: 61 - protein, 217 aa, Artificial Sequence
  source: /note="Description of Artificial Sequence: Synthetic polypeptide"
DIQMTQSPSSLSASVGDRVTITCRASQGIRNYLAWYQQKPGKAPKLLIYAASTLQSGVPSRFSGSGSGTDFTLTISSLQPEDVATYYCQRYNRAPYTFGQGTKVEIKRTAELPPKVSVFVPPRDGFFGNPRKSKLICKATGFSPRQIQVSWLREGKQVGSGVTTKQVQAEAKESGPTTYKVTSTLTIKESDWLGQSMFTCRVDHRGLTFQQNASSMC

SEQ ID NO: 62 - protein, 457 aa, Artificial Sequence
  source: /note="Description of Artificial Sequence: Synthetic polypeptide"
EVQLVESGGGLVQPGGSLRLSCAASGFNIKDTYIHWVRQAPGKGLEWVARIYPTNGYTRYADSVKGRFTISADTSKNTAYLQMNSLRAEDTAVYYCSRWGGDGFYAMDYWGQGTLVTVSSASTELPPKVSVFVPPRDGFFGNPRKSELICEATGFSPRQIQVSWLREGKQVGSGVTTDQVQAEAKESGPTTYDVTSTLTIKESDWLGQSMFTCRVDHRGLTFQQNASSMCDKTHTCPPCPAPEAAGGPSVFLFPPKPKDTLMISRTPEVTCVVVDVSHEDPEVKFNWYVDGVEVHNAKTKPREEQYNSTYRVVSVLTVLHQDWLNGKEYKCKVSNKALPAPIEKTISKAKGQPREPQVYTLPPSREEMTKNQVSLWCLVKGFYPSDIAVEWESNGQPENNYKTTPPVLDSDGSFFLYSKLTVDKSRWQQGNVFSCSVMHEALHNHYTQKSLSLSPGK

SEQ ID NO: 63 - protein, 217 aa, Artificial Sequence
  source: /note="Description of Artificial Sequence: Synthetic polypeptide"
DIQMTQSPSSLSASVGDRVTITCRASQDVNTAVAWYQQKPGKAPKLLIYSASFLYSGVPSRFSGSRSGTDFTLTISSLQPEDFATYYCQQHYTTPPTFGQGTKVEIKRTAELPPKVSVFVPPRDGFFGNPRKSKLICKATGFSPRQIQVSWLREGKQVGSGVTTKQVQAEAKESGPTTYKVTSTLTIKESDWLGQSMFTCRVDHRGLTFQQNASSMC

SEQ ID NO: 64 - protein, 120 aa, Artificial Sequence [sequence omitted]

SEQ ID NO: 65 - protein, 107 aa, Artificial Sequence [sequence omitted]

SEQ ID NO: 66 - protein, 119 aa, Artificial Sequence
  source: /note="Description of Artificial Sequence: Synthetic polypeptide"
QVQLKQSGPGLVQPSQSLSITCTVSGFSLTNYGVHWVRQSPGKGLEWLGVIWSGGNTDYNTPFTSRLSINKDNSKSQVFFKMNSLQSNDTAIYYCARALTYYDYEFAYWGQGTLVTVSA

SEQ ID NO: 67 - protein, 107 aa, Artificial Sequence
  source: /note="Description of Artificial Sequence: Synthetic polypeptide"
DILLTQSPVILSVSPGERVSFSCRASQSIGTNIHWYQQRTNGSPRLLIKYASESISGIPSRFSGSGSGTDFTLSINSVESEDIADYYCQQNNNWPTTFGAGTKLELK

SEQ ID NO: 68 - protein, 457 aa, Artificial Sequence
  source: /note="Description of Artificial Sequence: Synthetic polypeptide"
EVQLVESGGGLVQPGGSLRLSCAASGFNIKDTYIHWVRQAPGKGLEWVARIYPTNGYTRYADSVKGRFTISADTSKNTAYLQMNSLRAEDTAVYYCSRWGGDGFYAMDYWGQGTLVTVSSASTELPPKVSVFVPPRDGFFGNPRKSKLICQATGFSPRQIQVSWLREGKQVGSGVTTDQVQAEAKESGPTTYKVTSTLTIKESDWLGQSMFTCRVDHRGLTFQQNASSMCDKTHTCPPCPAPELLGGPSVFLFPPKPKDTLMISRTPEVTCVVVDVSHEDPEVKFNWYVDGVEVHNAKTKPREEQYNSTYRVVSVLTVLHQDWLNGKEYKCKVSNKALPAPIEKTISKAKGQPREPQVYTLPPSREEMTKNQVSLWCLVKGFYPSDIAVEWESNGQPENNYKTTPPVLDSDGSFFLYSKLTVDKSRWQQGNVFSCSVMHEALHNHYTQKSLSLSPGK

SEQ ID NO: 69 - protein, 217 aa, Artificial Sequence
  source: /note="Description of Artificial Sequence: Synthetic polypeptide"
DIQMTQSPSSLSASVGDRVTITCRASQDVNTAVAWYQQKPGKAPKLLIYSASFLYSGVPSRFSGSRSGTDFTLTISSLQPEDFATYYCQQHYTTPPTFGQGTKVEIKRTAELPPKVSVFVPPRDGFFGNPRKSKLICQATGFSPRQIQVSWLREGKQVGSGVTTDQVQAEAKESGPTTYKVTSTLTIKESDWLGQSMFTCRVDHRGLTFQQNASSMC

SEQ ID NO: 70 - protein, 449 aa, Artificial Sequence
  source: /note="Description of Artificial Sequence: Synthetic polypeptide"
QVQLKQSGPGLVQPSQSLSITCTVSGFSLTNYGVHWVRQSPGKGLEWLGVIWSGGNTDYNTPFTSRLSINKDNSKSQVFFKMNSLQSNDTAIYYCARALTYYDYEFAYWGQGTLVTVSAASTKGPSVFPLAPSSKSTSGGTAALGCLVKDYFPEPVTVSWNSGALTSGVHTFPAVLQSSGLYSLSSVVTVPSSSLGTQTYICNVNHKPSNTKVDKKVEPKSCDKTHTCPPCPAPELLGGPSVFLFPPKPKDTLMISRTPEVTCVVVDVSHEDPEVKFNWYVDGVEVHNAKTKPREEQYNSTYRVVSVLTVLHQDWLNGKEYKCKVSNKALPAPIEKTISKAKGQPREPQVYTLPPSREEMTKNQVSLSCAVKGFYPSDIAVEWESNGQPENNYKTTPPVLDSDGSFFLVSKLTVDKSRWQQGNVFSCSVMHEALHNHYTQKSLSLSPGK

SEQ ID NO: 71 - protein, 214 aa, Artificial Sequence
  source: /note="Description of Artificial Sequence: Synthetic polypeptide"
DILLTQSPVILSVSPGERVSFSCRASQSIGTNIHWYQQRTNGSPRLLIKYASESISGIPSRFSGSGSGTDFTLSINSVESEDIADYYCQQNNNWPTTFGAGTKLELKRTVAAPSVFIFPPSDEQLKSGTASVVCLLNNFYPREAKVQWKVDNALQSGNSQESVTEQDSKDSTYSLSSTLTLSKADYEKHKVYACEVTHQGLSSPVTKSFNRGEC

SEQ ID NO: 72 - protein, 457 aa, Artificial Sequence
  source: /note="Description of Artificial Sequence: Synthetic polypeptide"
EVQLVESGGGLVQPGGSLRLSCAASGFNIKDTYIHWVRQAPGKGLEWVARIYPTNGYTRYADSVKGRFTISADTSKNTAYLQMNSLRAEDTAVYYCSRWGGDGFYAMDYWGQGTLVTVSSASTELPPKVSVFVPPRDGFFGNPRKSELICEATGFSPRQIQVSWLREGKQVGSGVTTDQVQAEAKESGPTTYDVTSTLTIKESDWLGQSMFTCRVDHRGLTFQQNASSMCDKTHTCPPCPAPELLGGPSVFLFPPKPKDTLMISRTPEVTCVVVDVSHEDPEVKFNWYVDGVEVHNAKTKPREEQYNSTYRVVSVLTVLHQDWLNGKEYKCKVSNKALPAPIEKTISKAKGQPREPQVYTLPPSREEMTKNQVSLWCLVKGFYPSDIAVEWESNGQPENNYKTTPPVLDSDGSFFLYSKLTVDKSRWQQGNVFSCSVMHEALHNHYTQKSLSLSPGK

SEQ ID NO: 73 - protein, 217 aa, Artificial Sequence; identical to SEQ ID NO: 63
  source: /note="Description of Artificial Sequence: Synthetic polypeptide"

SEQ ID NO: 74 - protein, 449 aa, Artificial Sequence; identical to SEQ ID NO: 70
  source: /note="Description of Artificial Sequence: Synthetic polypeptide"

SEQ ID NO: 75 - protein, 214 aa, Artificial Sequence; identical to SEQ ID NO: 71
  source: /note="Description of Artificial Sequence: Synthetic polypeptide"

SEQ ID NO: 76 - protein, 457 aa, Artificial Sequence
  source: /note="Description of Artificial Sequence: Synthetic polypeptide"
EVQLVESGGGLVQPGGSLRLSCAASGFNIKDTYIHWVRQAPGKGLEWVARIYPTNGYTRYADSVKGRFTISADTSKNTAYLQMNSLRAEDTAVYYCSRWGGDGFYAMDYWGQGTLVTVSSASTELPPKVSVFVPPRDGFFGNPRKSKLICKATGFSPRQIQVSWLREGKQVGSGVTTKQVQAEAKESGPTTYKVTSTLTIKESDWLGQSMFTCRVDHRGLTFQQNASSMCDKTHTCPPCPAPELLGGPSVFLFPPKPKDTLMISRTPEVTCVVVDVSHEDPEVKFNWYVDGVEVHNAKTKPREEQYNSTYRVVSVLTVLHQDWLNGKEYKCKVSNKALPAPIEKTISKAKGQPREPQVYTLPPSREEMTKNQVSLWCLVKGFYPSDIAVEWESNGQPENNYKTTPPVLDSDGSFFLYSKLTVDKSRWQQGNVFSCSVMHEALHNHYTQKSLSLSPGK

SEQ ID NO: 77 - protein, 217 aa, Artificial Sequence
  source: /note="Description of Artificial Sequence: Synthetic polypeptide"
DIQMTQSPSSLSASVGDRVTITCRASQDVNTAVAWYQQKPGKAPKLLIYSASFLYSGVPSRFSGSRSGTDFTLTISSLQPEDFATYYCQQHYTTPPTFGQGTKVEIKRTAELPPKVSVFVPPRDGFFGNPRKSELICEATGFSPRQIQVSWLREGKQVGSGVTTDQVQAEAKESGPTTYDVTSTLTIKESDWLGQSMFTCRVDHRGLTFQQNASSMC

SEQ ID NO: 78 - protein, 449 aa, Artificial Sequence; identical to SEQ ID NO: 70
  source: /note="Description of Artificial Sequence: Synthetic polypeptide"

SEQ ID NO: 79 - protein, 214 aa, Artificial Sequence; identical to SEQ ID NO: 71
  source: /note="Description of Artificial Sequence: Synthetic polypeptide"

SEQ ID NO: 80 - protein, 457 aa, Artificial Sequence
  source: /note="Description of Artificial Sequence: Synthetic polypeptide"
EVQLVESGGGLVQPGGSLRLSCAASGFNIKDTYIHWVRQAPGKGLEWVARIYPTNGYTRYADSVKGRFTISADTSKNTAYLQMNSLRAEDTAVYYCSRWGGDGFYAMDYWGQGTLVTVSSASTELPPKVSVFVPPRDGFFGNPRKSKLACSATGFSPRQIQVSWLREGKQVGSGVTTDQVQAEAKESGPTTYKVASTLTIKESDWLGQSMFTCRVDHRGLTFQQNASSMCDKTHTCPPCPAPELLGGPSVFLFPPKPKDTLMISRTPEVTCVVVDVSHEDPEVKFNWYVDGVEVHNAKTKPREEQYNSTYRVVSVLTVLHQDWLNGKEYKCKVSNKALPAPIEKTISKAKGQPREPQVYTLPPSREEMTKNQVSLWCLVKGFYPSDIAVEWESNGQPENNYKTTPPVLDSDGSFFLYSKLTVDKSRWQQGNVFSCSVMHEALHNHYTQKSLSLSPGK

SEQ ID NO: 81 - protein, 217 aa, Artificial Sequence
  source: /note="Description of Artificial Sequence: Synthetic polypeptide"
DIQMTQSPSSLSASVGDRVTITCRASQDVNTAVAWYQQKPGKAPKLLIYSASFLYSGVPSRFSGSRSGTDFTLTISSLQPEDFATYYCQQHYTTPPTFGQGTKVEIKRTAELPPKVSVFVPPRDGFFGNPRKSKLWCQATGFSPRQIQVSWLREGKQVGSGVTTDQVQAEAKESGPTTYKVTSTLTIKESDWLGQSMFTCRVDHRGLTFQQNASSMC

SEQ ID NO: 82 - protein, 449 aa, Artificial Sequence; identical to SEQ ID NO: 70
  source: /note="Description of Artificial Sequence: Synthetic polypeptide"

SEQ ID NO: 83 - protein, 214 aa, Artificial Sequence; identical to SEQ ID NO: 71
  source: /note="Description of Artificial Sequence: Synthetic polypeptide"

SEQ ID NO: 84 - protein, 457 aa, Artificial Sequence
  source: /note="Description of Artificial Sequence: Synthetic polypeptide"
EVQLVESGGGLVQPGGSLRLSCAASGFNIKDTYIHWVRQAPGKGLEWVARIYPTNGYTRYADSVKGRFTISADTSKNTAYLQMNSLRAEDTAVYYCSRWGGDGFYAMDYWGQGTLVTVSSASTELPPKVSVFVPPRDGFFGNPRKSKLWCQATGFSPRQIQVSWLREGKQVGSGVTTDQVQAEAKESGPTTYKVTSTLTIKESDWLGQSMFTCRVDHRGLTFQQNASSMCDKTHTCPPCPAPELLGGPSVFLFPPKPKDTLMISRTPEVTCVVVDVSHEDPEVKFNWYVDGVEVHNAKTKPREEQYNSTYRVVSVLTVLHQDWLNGKEYKCKVSNKALPAPIEKTISKAKGQPREPQVYTLPPSREEMTKNQVSLWCLVKGFYPSDIAVEWESNGQPENNYKTTPPVLDSDGSFFLYSKLTVDKSRWQQGNVFSCSVMHEALHNHYTQKSLSLSPGK

SEQ ID NO: 85 - protein, 217 aa, Artificial Sequence
  source: /note="Description of Artificial Sequence: Synthetic polypeptide"
DIQMTQSPSSLSASVGDRVTITCRASQDVNTAVAWYQQKPGKAPKLLIYSASFLYSGVPSRFSGSRSGTDFTLTISSLQPEDFATYYCQQHYTTPPTFGQGTKVEIKRTAELPPKVSVFVPPRDGFFGNPRKSKLACSATGFSPRQIQVSWLREGKQVGSGVTTDQVQAEAKESGPTTYKVASTLTIKESDWLGQSMFTCRVDHRGLTFQQNASSMC

SEQ ID NO: 86 - protein, 449 aa, Artificial Sequence; identical to SEQ ID NO: 70
  source: /note="Description of Artificial Sequence: Synthetic polypeptide"

SEQ ID NO: 87 - protein, 214 aa, Artificial Sequence; identical to SEQ ID NO: 71
  source: /note="Description of Artificial Sequence: Synthetic polypeptide"

SEQ ID NO: 88 - protein, 450 aa, Artificial Sequence
  source: /note="Description of Artificial Sequence: Synthetic polypeptide"
EVQLVESGGGLVQPGGSLRLSCAASGFNIKDTYIHWVRQAPGKGLEWVARIYPTNGYTRYADSVKGRFTISADTSKNTAYLQMNSLRAEDTAVYYCSRWGGDGFYAMDYWGQGTLVTVSSASTKGPSVFPLAPSSKSTSGGTAALGCLVKDYFPEPVTVSWNSGALTSGVHTFPAVLQSSGLYSLSSVVTVPSSSLGTQTYICNVNHKPSNTKVDKKVEPKSCDKTHTCPPCPAPELLGGPSVFLFPPKPKDTLMISRTPEVTCVVVDVSHEDPEVKFNWYVDGVEVHNAKTKPREEQYNSTYRVVSVLTVLHQDWLNGKEYKCKVSNKALPAPIEKTISKAKGQPREPQVYTLPPSREEMTKNQVSLWCLVKGFYPSDIAVEWESNGQPENNYKTTPPVLDSDGSFFLYSKLTVDKSRWQQGNVFSCSVMHEALHNHYTQKSLSLSPGK

SEQ ID NO: 89 - protein, 214 aa, Artificial Sequence
  source: /note="Description of Artificial Sequence: Synthetic polypeptide"
DIQMTQSPSSLSASVGDRVTITCRASQDVNTAVAWYQQKPGKAPKLLIYSASFLYSGVPSRFSGSRSGTDFTLTISSLQPEDFATYYCQQHYTTPPTFGQGTKVEIKRTVAAPSVFIFPPSDEQLKSGTASVVCLLNNFYPREAKVQWKVDNALQSGNSQESVTEQDSKDSTYSLSSTLTLSKADYEKHKVYACEVTHQGLSSPVTKSFNRGEC

SEQ ID NO: 90 - protein, 449 aa, Artificial Sequence; identical to SEQ ID NO: 70
  source: /note="Description of Artificial Sequence: Synthetic polypeptide"

SEQ ID NO: 91 - protein, 214 aa, Artificial Sequence; identical to SEQ ID NO: 71
  source: /note="Description of Artificial Sequence: Synthetic polypeptide"

SEQ ID NO: 92 - protein, 450 aa, Artificial Sequence
  source: /note="Description of Artificial Sequence: Synthetic polypeptide"
EVQLVESGGGLVQPGGSLRLSCAASGFNIKDTYIHWVRQAPGKGLEWVARIYPTNGYTRYADSVKGRFTISADTSKNTAYLQMNSLRAEDTAVYYCSRWGGDGFYAMDYWGQGTLVTVSSASTKGPSVFPLAPSSKSTSGGTAALGCLVKDYFPEPVTVSWNSGALTSGVHTFPAVLQSSGLYSLSSVVTVPSSSLGTQTYICNVNHKPSNTKVDKKVEPKSCDKTHTSPPSPAPELLGGPSVFLFPPKPKDTLMISRTPEVTCVVVDVSHEDPEVKFNWYVDGVEVHNAKTKPREEQYNSTYRVVSVLTVLHQDWLNGKEYKCKVSNKALPAPIEKTISKAKGQPREPQVYTLPPSREEMTKNQVSLTCLVKGFYPSDIAVEWESNGQPENNYKTTPPVLDSDGSFRLYSKLTVDKSRWQQGNVFSCSVMHEALHNHYTQKSLSLSPGK

SEQ ID NO: 93 - protein, 214 aa, Artificial Sequence; identical to SEQ ID NO: 89
  source: /note="Description of Artificial Sequence: Synthetic polypeptide"

SEQ ID NO: 94 - protein, 457 aa, Artificial Sequence
  source: /note="Description of Artificial Sequence: Synthetic polypeptide"
EVQLVESGGGLVQPGGSLRLSCAASGFNIKDTYIHWVRQAPGKGLEWVARIYPTNGYTRYADSVKGRFTISADTSKNTAYLQMNSLRAEDTAVYYCSRWGGDGFYAMDYWGQGTLVTVSSASTELPPKVSVFVPPRDGFFGNPRKSKLICQATGFSPRQIQVSWLREGKQVGSGVTTDQVQAEAKESGPTTYKVTSTLTIKESDWLGQSMFTCRVDHRGLTFQQSASSMCDKTHTCPPCPAPELLGGPSVFLFPPKPKDTLMISRTPEVTCVVVDVSHEDPEVKFNWYVDGVEVHNAKTKPREEQYNSTYRVVSVLTVLHQDWLNGKEYKCKVSNKALPAPIEKTISKAKGQPREPQVYTLPPSREEMTKNQVSLWCLVKGFYPSDIAVEWESNGQPENNYKTTPPVLDSDGSFFLYSKLTVDKSRWQQGNVFSCSVMHEALHNHYTQKSLSLSPGK

SEQ ID NO: 95 - protein, 217 aa, Artificial Sequence
  source: /note="Description of Artificial Sequence: Synthetic polypeptide"
DIQMTQSPSSLSASVGDRVTITCRASQDVNTAVAWYQQKPGKAPKLLIYSASFLYSGVPSRFSGSRSGTDFTLTISSLQPEDFATYYCQQHYTTPPTFGQGTKVEIKRTAELPPKVSVFVPPRDGFFGNPRKSKLICQATGFSPRQIQVSWLREGKQVGSGVTTDQVQAEAKESGPTTYKVTSTLTIKESDWLGQSMFTCRVDHRGLTFQQSASSMC

SEQ ID NO: 96 - protein, 449 aa, Artificial Sequence; identical to SEQ ID NO: 70
  source: /note="Description of Artificial Sequence: Synthetic polypeptide"

SEQ ID NO: 97 - protein, 214 aa, Artificial Sequence; identical to SEQ ID NO: 71
  source: /note="Description of Artificial Sequence: Synthetic polypeptide"

SEQ ID NO: 98 - protein, 457 aa, Artificial Sequence
  source: /note="Description of Artificial Sequence: Synthetic polypeptide"
EVQLVESGGGLVQPGGSLRLSCAASGFNIKDTYIHWVRQAPGKGLEWVARIYPTNGYTRYADSVKGRFTISADTSKNTAYLQMNSLRAEDTAVYYCSRWGGDGFYAMDYWGQGTLVTVSSASTELPPKVSVFVPPRDGFFGNPRKSELICEATGFSPRQIQVSWLREGKQVGSGVTTDQVQAEAKESGPTTYDVTSTLTIKESDWLGQSMFTCRVDHRGLTFQQSASSMCDKTHTCPPCPAPELLGGPSVFLFPPKPKDTLMISRTPEVTCVVVDVSHEDPEVKFNWYVDGVEVHNAKTKPREEQYNSTYRVVSVLTVLHQDWLNGKEYKCKVSNKALPAPIEKTISKAKGQPREPQVYTLPPSREEMTKNQVSLWCLVKGFYPSDIAVEWESNGQPENNYKTTPPVLDSDGSFFLYSKLTVDKSRWQQGNVFSCSVMHEALHNHYTQKSLSLSPGK

SEQ ID NO: 99 - protein, 217 aa, Artificial Sequence
  source: /note="Description of Artificial Sequence: Synthetic polypeptide"
DIQMTQSPSSLSASVGDRVTITCRASQDVNTAVAWYQQKPGKAPKLLIYSASFLYSGVPSRFSGSRSGTDFTLTISSLQPEDFATYYCQQHYTTPPTFGQGTKVEIKRTAELPPKVSVFVPPRDGFFGNPRKSKLICKATGFSPRQIQVSWLREGKQVGSGVTTKQVQAEAKESGPTTYKVTSTLTIKESDWLGQSMFTCRVDHRGLTFQQSASSMC

SEQ ID NO: 100 - protein, 449 aa, Artificial Sequence; identical to SEQ ID NO: 70
  source: /note="Description of Artificial Sequence: Synthetic polypeptide"

SEQ ID NO: 101 - protein, 214 aa, Artificial Sequence; identical to SEQ ID NO: 71
  source: /note="Description of Artificial Sequence: Synthetic polypeptide"

SEQ ID NO: 102 - protein, 457 aa, Artificial Sequence
  source: /note="Description of Artificial Sequence: Synthetic polypeptide"
EVQLVESGGGLVQPGGSLRLSCAASGFNIKDTYIHWVRQAPGKGLEWVARIYPTNGYTRYADSVKGRFTISADTSKNTAYLQMNSLRAEDTAVYYCSRWGGDGFYAMDYWGQGTLVTVSSASTELPPKVSVFVPPRDGFFGNPRKSKLICKATGFSPRQIQVSWLREGKQVGSGVTTKQVQAEAKESGPTTYKVTSTLTIKESDWLGQSMFTCRVDHRGLTFQQSASSMCDKTHTCPPCPAPELLGGPSVFLFPPKPKDTLMISRTPEVTCVVVDVSHEDPEVKFNWYVDGVEVHNAKTKPREEQYNSTYRVVSVLTVLHQDWLNGKEYKCKVSNKALPAPIEKTISKAKGQPREPQVYTLPPSREEMTKNQVSLWCLVKGFYPSDIAVEWESNGQPENNYKTTPPVLDSDGSFFLYSKLTVDKSRWQQGNVFSCSVMHEALHNHYTQKSLSLSPGK

SEQ ID NO: 103 - protein, 217 aa, Artificial Sequence
  source: /note="Description of Artificial Sequence: Synthetic polypeptide"
DIQMTQSPSSLSASVGDRVTITCRASQDVNTAVAWYQQKPGKAPKLLIYSASFLYSGVPSRFSGSRSGTDFTLTISSLQPEDFATYYCQQHYTTPPTFGQGTKVEIKRTAELPPKVSVFVPPRDGFFGNPRKSELICEATGFSPRQIQVSWLREGKQVGSGVTTDQVQAEAKESGPTTYDVTSTLTIKESDWLGQSMFTCRVDHRGLTFQQSASSMC

SEQ ID NO: 104 - protein, 449 aa, Artificial Sequence; identical to SEQ ID NO: 70
  source: /note="Description of Artificial Sequence: Synthetic polypeptide"

SEQ ID NO: 105 - protein, 214 aa, Artificial Sequence; identical to SEQ ID NO: 71
  source: /note="Description of Artificial Sequence: Synthetic polypeptide"

SEQ ID NO: 106 - protein, 457 aa, Artificial Sequence
  source: /note="Description of Artificial Sequence: Synthetic polypeptide"
EVQLVESGGGLVQPGGSLRLSCAASGFNIKDTYIHWVRQAPGKGLEWVARIYPTNGYTRYADSVKGRFTISADTSKNTAYLQMNSLRAEDTAVYYCSRWGGDGFYAMDYWGQGTLVTVSSASTELPPKVSVFVPPRDGFFGNPRKSKLACSATGFSPRQIQVSWLREGKQVGSGVTTDQVQAEAKESGPTTYKVASTLTIKESDWLGQSMFTCRVDHRGLTFQQSASSMCDKTHTCPPCPAPELLGGPSVFLFPPKPKDTLMISRTPEVTCVVVDVSHEDPEVKFNWYVDGVEVHNAKTKPREEQYNSTYRVVSVLTVLHQDWLNGKEYKCKVSNKALPAPIEKTISKAKGQPREPQVYTLPPSREEMTKNQVSLWCLVKGFYPSDIAVEWESNGQPENNYKTTPPVLDSDGSFFLYSKLTVDKSRWQQGNVFSCSVMHEALHNHYTQKSLSLSPGK

SEQ ID NO: 107 - protein, 217 aa, Artificial Sequence
  source: /note="Description of Artificial Sequence: Synthetic polypeptide"
DIQMTQSPSSLSASVGDRVTITCRASQDVNTAVAWYQQKPGKAPKLLIYSASFLYSGVPSRFSGSRSGTDFTLTISSLQPEDFATYYCQQHYTTPPTFGQGTKVEIKRTAELPPKVSVFVPPRDGFFGNPRKSKLWCQATGFSPRQIQVSWLREGKQVGSGVTTDQVQAEAKESGPTTYKVTSTLTIKESDWLGQSMFTCRVDHRGLTFQQSASSMC

SEQ ID NO: 108 - protein, 449 aa, Artificial Sequence; identical to SEQ ID NO: 70
  source: /note="Description of Artificial Sequence: Synthetic polypeptide"

SEQ ID NO: 109 - protein, 214 aa, Artificial Sequence; identical to SEQ ID NO: 71
  source: /note="Description of Artificial Sequence: Synthetic polypeptide"

SEQ ID NO: 110 - protein, 457 aa, Artificial Sequence
  source: /note="Description of Artificial Sequence: Synthetic polypeptide"
EVQLVESGGGLVQPGGSLRLSCAASGFNIKDTYIHWVRQAPGKGLEWVARIYPTNGYTRYADSVKGRFTISADTSKNTAYLQMNSLRAEDTAVYYCSRWGGDGFYAMDYWGQGTLVTVSSASTELPPKVSVFVPPRDGFFGNPRKSKLWCQATGFSPRQIQVSWLREGKQVGSGVTTDQVQAEAKESGPTTYKVTSTLTIKESDWLGQSMFTCRVDHRGLTFQQSASSMCDKTHTCPPCPAPELLGGPSVFLFPPKPKDTLMISRTPEVTCVVVDVSHEDPEVKFNWYVDGVEVHNAKTKPREEQYNSTYRVVSVLTVLHQDWLNGKEYKCKVSNKALPAPIEKTISKAKGQPREPQVYTLPPSREEMTKNQVSLWCLVKGFYPSDIAVEWESNGQPENNYKTTPPVLDSDGSFFLYSKLTVDKSRWQQGNVFSCSVMHEALHNHYTQKSLSLSPGK

SEQ ID NO: 111 - protein, 217 aa, Artificial Sequence
  source: /note="Description of Artificial Sequence: Synthetic polypeptide"
DIQMTQSPSSLSASVGDRVTITCRASQDVNTAVAWYQQKPGKAPKLLIYSASFLYSGVPSRFSGSRSGTDFTLTISSLQPEDFATYYCQQHYTTPPTFGQGTKVEIKRTAELPPKVSVFVPPRDGFFGNPRKSKLACSATGFSPRQIQVSWLREGKQVGSGVTTDQVQAEAKESGPTTYKVASTLTIKESDWLGQSMFTCRVDHRGLTFQQSASSMC

SEQ ID NO: 112 - protein, 449 aa, Artificial Sequence; identical to SEQ ID NO: 70
  source: /note="Description of Artificial Sequence: Synthetic polypeptide"

SEQ ID NO: 113 - protein, 214 aa, Artificial Sequence; identical to SEQ ID NO: 71
  source: /note="Description of Artificial Sequence: Synthetic polypeptide"

SEQ ID NO: 114 - protein, 119 aa, Artificial Sequence; identical to SEQ ID NO: 66
  source: /note="Description of Artificial Sequence: Synthetic polypeptide"

SEQ ID NO: 115 - protein, 107 aa, Artificial Sequence; identical to SEQ ID NO: 67
  source: /note="Description of Artificial Sequence: Synthetic polypeptide"

SEQ ID NO: 116 - protein, 119 aa, Artificial Sequence [sequence omitted]

SEQ ID NO: 117 - protein, 106 aa, Artificial Sequence
  source: /note="Description of Artificial Sequence: Synthetic polypeptide"
QIVLTQSPAIMSASPGEKVTMTCRASSSVSYMNWYQQKSGTSPKRWIYDTSKVASGVPYRFSGSGSGTSYSLTISSMEAEDAATYYCQQWSSNPLTFGSGTKLEIN

SEQ ID NO: 118 - protein, 119 aa, Artificial Sequence
  source: /note="Description of Artificial Sequence: Synthetic polypeptide"
QVQLKQSGPGLVQPSQSLSITCTVSGFSLTNYGVHWVRQSPGKGLEWLGVIWSGGNTDYNTPFTSRLSINKDNSKSQVFFKMNSLQSEDTAIYYCARALTYYDYEFAYWGQGTLVTVSA

SEQ ID NO: 119 - protein, 107 aa, Artificial Sequence
  source: /note="Description of Artificial Sequence: Synthetic polypeptide"
DILLTQSPVILSVSPGERVSFSCRASQSIGTNIHWYQQRTSGSPRLLIKYASESISGIPSRFSGSGSGTDFTLSINSVESEDIADYYCQQNNNWPTTFGAGTKLELK

SEQ ID NO: 120 - protein, 119 aa, Artificial Sequence
  source: /note="Description of Artificial Sequence: Synthetic polypeptide"
QVQLQQSGAELARPGASVKMSCKASGYTFTRYTMHWVKQRPGQGLEWIGYINPSRGYTNYNQKFKDKATLTTDKSSSTAYMQLSSLTSEDSAVYYCARYYDDHYSLDYWGQGTTLTVSS

SEQ ID NO: 121 - protein, 106 aa, Artificial Sequence
  source: /note="Description of Artificial Sequence: Synthetic polypeptide"
QIVLTQSPAIMSASPGEKVTMTCRASSSVSYMNWYQQKSGTSPKRWIYDTSKVASGVPYRFSGSGSGTSYSLTISSMEAEDAATYYCQQWSSNPLTFGSGTKLEIK

SEQ ID NO: 122 - protein, 117 aa, Artificial Sequence
  source: /note="Description of Artificial Sequence: Synthetic polypeptide"
EVQLVESGGGLVQPGGSLRLSCAASGFAFSSYDMSWVRQAPGKGLEWVSYISGGGFTYYPDTVKGRFTISRDNSKNTLYLQMNSLRAEDTAVYYCARQGANWELVYWGQGTLVTVSS

SEQ ID NO: 123 - protein, 107 aa, Artificial Sequence
  source: /note="Description of Artificial Sequence: Synthetic polypeptide"
EIVLTQSPATLSLSPGERATLSCRASQSISDFLHWYQQKPGQAPRLLIKYASQSISGIPARFSGSGSGTDFTLTISSLEPEDFAVYYCQNGHNFPPTFGGGTKVEIK

SEQ ID NO: 124 - protein, 113 aa, Artificial Sequence [sequence omitted]

SEQ ID NO: 125 - protein, 107 aa, Artificial Sequence [sequence omitted]

SEQ ID NO: 126 - protein, 118 aa, Artificial Sequence
  source: /note="Description of Artificial Sequence: Synthetic polypeptide"
EVQLVESGGGLVQPGGSLRLSCAASGFTFSDSWIHWVRQAPGKGLEWVAWISPYGGSTYYADSVKGRFTISADTSKNTAYLQMNSLRAEDTAVYYCARRHYPGGFDYWGQGTLVTVSA

SEQ ID NO: 127 - protein, 107 aa, Artificial Sequence [sequence omitted]

SEQ ID NO: 128 - protein, 454 aa, Artificial Sequence
  source: /note="Description of Artificial Sequence: Synthetic polypeptide"
EVQLVESGGGLVQPGGSLRLSCAASGFAFSSYDMSWVRQAPGKGLEWVSYISGGGFTYYPDTVKGRFTISRDNSKNTLYLQMNSLRAEDTAVYYCARQGANWELVYWGQGTLVTVSSASTELPPKVSVFVPPRDGFFGNPRKSKLICQATGFSPRQIQVSWLREGKQVGSGVTTDQVQAEAKESGPTTYKVTSTLTIKESDWLGQSMFTCRVDHRGLTFQQNASSMCDKTHTCPPCPAPELLGGPSVFLFPPKPKDTLMISRTPEVTCVVVDVSHEDPEVKFNWYVDGVEVHNAKTKPREEQYNSTYRVVSVLTVLHQDWLNGKEYKCKVSNKALPAPIEKTISKAKGQPREPQVYTLPPSREEMTKNQVSLWCLVKGFYPSDIAVEWESNGQPENNYKTTPPVLDSDGSFFLYSKLTVDKSRWQQGNVFSCSVMHEALHNHYTQKSLSLSPGK

SEQ ID NO: 129 - protein, 217 aa, Artificial Sequence
  source: /note="Description of Artificial Sequence: Synthetic polypeptide"
EIVLTQSPATLSLSPGERATLSCRASQSISDFLHWYQQKPGQAPRLLIKYASQSISGIPARFSGSGSGTDFTLTISSLEPEDFAVYYCQNGHNFPPTFGGGTKVEIKRTAELPPKVSVFVPPRDGFFGNPRKSKLICQATGFSPRQIQVSWLREGKQVGSGVTTDQVQAEAKESGPTTYKVTSTLTIKESDWLGQSMFTCRVDHRGLTFQQNASSMC

SEQ ID NO: 130 - protein, 581 aa, Artificial Sequence
  source: /note="Description of Artificial Sequence: Synthetic polypeptide"
QVQLKQSGPGLVQPSQSLSITCTVSGFSLTNYGVHWVRQSPGKGLEWLGVIWSGGNTDYNTPFTSRLSINKDNSKSQVFFKMNSLQSNDTAIYYCARALTYYDYEFAYWGQGTLVTVSAASTKGPSVFPLAPQVQLQQSGAELARPGASVKMSCKASGYTFTRYTMHWVKQRPGQGLEWIGYINPSRGYTNYNQKFKDKATLTTDKSSSTAYMQLSSLTSEDSAVYYCARYYDDHYCLDYWGQGTTLTVSSASTKGPSVFPLAPSSKSTSGGTAALGCLVKDYFPEPVTVSWNSGALTSGVHTFPAVLQSSGLYSLSSVVTVPSSSLGTQTYICNVNHKPSNTKVDKKVEPKSCDKTHTCPPCPAPELLGGPSVFLFPPKPKDTLMISRTPEVTCVVVDVSHEDPEVKFNWYVDGVEVHNAKTKPREEQYNSTYRVVSVLTVLHQDWLNGKEYKCKVSNKALPAPIEKTISKAKGQPREPQVYTLPPSREEMTKNQVSLSCAVKGFYPSDIAVEWESNGQPENNYKTTPPVLDSDGSFFLVSKLTVDKSRWQQGNVFSCSVMHEALHNHYTQKSLSLSPGK

SEQ ID NO: 131 - protein, 333 aa, Artificial Sequence
  source: /note="Description of Artificial Sequence: Synthetic polypeptide"
DILLTQSPVILSVSPGERVSFSCRASQSIGTNIHWYQQRTNGSPRLLIKYASESISGIPSRFSGSGSGTDFTLSINSVESEDIADYYCQQNNNWPTTFGAGTKLELKRTVAAPSVFIFPPQIVLTQSPAIMSASPGEKVTMTCRASSSVSYMNWYQQKSGTSPKRWIYDTSKVASGVPYRFSGSGSGTSYSLTISSMEAEDAATYYCQQWSSNPLTFGSGTKLEINRTVAAPSVFIFPPSDEQLKSGTASVVCLLNNFYPREAKVQWKVDNALQSGNSQESVTEQDSKDSTYSLSSTLTLSKADYEKHKVYACEVTHQGLSSPVTKSFNRGEC

SEQ ID NO: 132 - protein, 454 aa, Artificial Sequence
  source: /note="Description of Artificial Sequence: Synthetic polypeptide"
EVQLVESGGGLVQPGGSLRLSCAASGFAFSSYDMSWVRQAPGKGLEWVSYISGGGFTYYPDTVKGRFTISRDNSKNTLYLQMNSLRAEDTAVYYCARQGANWELVYWGQGTLVTVSSASTELPPKVSVFVPPRDGFFGNPRKSKLICKATGFSPRQIQVSWLREGKQVGSGVTTKQVQAEAKESGPTTYKVTSTLTIKESDWLGQSMFTCRVDHRGLTFQQNASSMCDKTHTCPPCPAPELLGGPSVFLFPPKPKDTLMISRTPEVTCVVVDVSHEDPEVKFNWYVDGVEVHNAKTKPREEQYNSTYRVVSVLTVLHQDWLNGKEYKCKVSNKALPAPIEKTISKAKGQPREPQVYTLPPSREEMTKNQVSLWCLVKGFYPSDIAVEWESNGQPENNYKTTPPVLDSDGSFFLYSKLTVDKSRWQQGNVFSCSVMHEALHNHYTQKSLSLSPGK

SEQ ID NO: 133 - protein, 217 aa, Artificial Sequence
  source: /note="Description of Artificial Sequence: Synthetic polypeptide"
EIVLTQSPATLSLSPGERATLSCRASQSISDFLHWYQQKPGQAPRLLIKYASQSISGIPARFSGSGSGTDFTLTISSLEPEDFAVYYCQNGHNFPPTFGGGTKVEIKRTAELPPKVSVFVPPRDGFFGNPRKSELICEATGFSPRQIQVSWLREGKQVGSGVTTDQVQAEAKESGPTTYDVTSTLTIKESDWLGQSMFTCRVDHRGLTFQQNASSMC

SEQ ID NO: 134 - protein, 581 aa, Artificial Sequence; identical to SEQ ID NO: 130
  source: /note="Description of Artificial Sequence: Synthetic polypeptide"

SEQ ID NO: 135 - protein, 333 aa, Artificial Sequence; identical to SEQ ID NO: 131
  source: /note="Description of Artificial Sequence: Synthetic polypeptide"

SEQ ID NO: 136 - protein, 454 aa, Artificial Sequence
  source: /note="Description of Artificial Sequence: Synthetic polypeptide"
EVQLVESGGGLVQPGGSLRLSCAASGFAFSSYDMSWVRQAPGKGLEWVSYISGGGFTYYPDTVKGRFTISRDNSKNTLYLQMNSLRAEDTAVYYCARQGANWELVYWGQGTLVTVSSASTELPPKVSVFVPPRDGFFGNPRKSELICEATGFSPRQIQVSWLREGKQVGSGVTTDQVQAEAKESGPTTYDVTSTLTIKESDWLGQSMFTCRVDHRGLTFQQNASSMCDKTHTCPPCPAPELLGGPSVFLFPPKPKDTLMISRTPEVTCVVVDVSHEDPEVKFNWYVDGVEVHNAKTKPREEQYNSTYRVVSVLTVLHQDWLNGKEYKCKVSNKALPAPIEKTISKAKGQPREPQVYTLPPSREEMTKNQVSLWCLVKGFYPSDIAVEWESNGQPENNYKTTPPVLDSDGSFFLYSKLTVDKSRWQQGNVFSCSVMHEALHNHYTQKSLSLSPGK

SEQ ID NO: 137 - protein, 217 aa, Artificial Sequence
  source: /note="Description of Artificial Sequence: Synthetic polypeptide"
EIVLTQSPATLSLSPGERATLSCRASQSISDFLHWYQQKPGQAPRLLIKYASQSISGIPARFSGSGSGTDFTLTISSLEPEDFAVYYCQNGHNFPPTFGGGTKVEIKRTAELPPKVSVFVPPRDGFFGNPRKSKLICKATGFSPRQIQVSWLREGKQVGSGVTTKQVQAEAKESGPTTYKVTSTLTIKESDWLGQSMFTCRVDHRGLTFQQNASSMC

SEQ ID NO: 138 - protein, 581 aa, Artificial Sequence; identical to SEQ ID NO: 130
  source: /note="Description of Artificial Sequence: Synthetic polypeptide"

SEQ ID NO: 139 - protein, 333 aa, Artificial Sequence; identical to SEQ ID NO: 131
  source: /note="Description of Artificial Sequence: Synthetic polypeptide"

SEQ ID NO: 140 - protein, 454 aa, Artificial Sequence
  source: /note="Description of Artificial Sequence: Synthetic polypeptide"
EVQLVESGGGLVQPGGSLRLSCAASGFAFSSYDMSWVRQAPGKGLEWVSYISGGGFTYYPDTVKGRFTISRDNSKNTLYLQMNSLRAEDTAVYYCARQGANWELVYWGQGTLVTVSSASTELPPKVSVFVPPRDGFFGNPRKSKLACSATGFSPRQIQVSWLREGKQVGSGVTTDQVQAEAKESGPTTYKVASTLTIKESDWLGQSMFTCRVDHRGLTFQQNASSMCDKTHTCPPCPAPELLGGPSVFLFPPKPKDTLMISRTPEVTCVVVDVSHEDPEVKFNWYVDGVEVHNAKTKPREEQYNSTYRVVSVLTVLHQDWLNGKEYKCKVSNKALPAPIEKTISKAKGQPREPQVYTLPPSREEMTKNQVSLWCLVKGFYPSDIAVEWESNGQPENNYKTTPPVLDSDGSFFLYSKLTVDKSRWQQGNVFSCSVMHEALHNHYTQKSLSLSPGK

SEQ ID NO: 141 - protein, 217 aa, Artificial Sequence
  source: /note="Description of Artificial Sequence: Synthetic polypeptide"
EIVLTQSPATLSLSPGERATLSCRASQSISDFLHWYQQKPGQAPRLLIKYASQSISGIPARFSGSGSGTDFTLTISSLEPEDFAVYYCQNGHNFPPTFGGGTKVEIKRTAELPPKVSVFVPPRDGFFGNPRKSKLWCQATGFSPRQIQVSWLREGKQVGSGVTTDQVQAEAKESGPTTYKVTSTLTIKESDWLGQSMFTCRVDHRGLTFQQNASSMC

SEQ ID NO: 142 - protein, 581 aa, Artificial Sequence; identical to SEQ ID NO: 130
  source: /note="Description of Artificial Sequence: Synthetic polypeptide"

SEQ ID NO: 143 - protein, 333 aa, Artificial Sequence; identical to SEQ ID NO: 131
  source: /note="Description of Artificial Sequence: Synthetic polypeptide"

SEQ ID NO: 144 - protein, 454 aa, Artificial Sequence
  source: /note="Description of Artificial Sequence: Synthetic polypeptide"
EVQLVESGGGLVQPGGSLRLSCAASGFAFSSYDMSWVRQAPGKGLEWVSYISGGGFTYYPDTVKGRFTISRDNSKNTLYLQMNSLRAEDTAVYYCARQGANWELVYWGQGTLVTVSSASTELPPKVSVFVPPRDGFFGNPRKSKLWCQATGFSPRQIQVSWLREGKQVGSGVTTDQVQAEAKESGPTTYKVTSTLTIKESDWLGQSMFTCRVDHRGLTFQQNASSMCDKTHTCPPCPAPELLGGPSVFLFPPKPKDTLMISRTPEVTCVVVDVSHEDPEVKFNWYVDGVEVHNAKTKPREEQYNSTYRVVSVLTVLHQDWLNGKEYKCKVSNKALPAPIEKTISKAKGQPREPQVYTLPPSREEMTKNQVSLWCLVKGFYPSDIAVEWESNGQPENNYKTTPPVLDSDGSFFLYSKLTVDKSRWQQGNVFSCSVMHEALHNHYTQKSLSLSPGK

SEQ ID NO: 145 - protein, 217 aa, Artificial Sequence
  source: /note="Description of Artificial Sequence: Synthetic polypeptide"
EIVLTQSPATLSLSPGERATLSCRASQSISDFLHWYQQKPGQAPRLLIKYASQSISGIPARFSGSGSGTDFTLTISSLEPEDFAVYYCQNGHNFPPTFGGGTKVEIKRTAELPPKVSVFVPPRDGFFGNPRKSKLACSATGFSPRQIQVSWLREGKQVGSGVTTDQVQAEAKESGPTTYKVASTLTIKESDWLGQSMFTCRVDHRGLTFQQNASSMC

SEQ ID NO: 146 - protein, 581 aa, Artificial Sequence; identical to SEQ ID NO: 130
  source: /note="Description of Artificial Sequence: Synthetic polypeptide"

SEQ ID NO: 147 - protein, 333 aa, Artificial Sequence; identical to SEQ ID NO: 131
  source: /note="Description of Artificial Sequence: Synthetic polypeptide"

SEQ ID NO: 148 - protein, 447 aa, Artificial Sequence
  source: /note="Description of Artificial Sequence: Synthetic polypeptide"
EVQLVESGGGLVMPGGSLKLSCAASGFAFSSYDMSWVRQTPEKRLEWVAYISGGGFTYYPDTVKGRFTLSRDNAKNTLYLQMSSLKSEDTAMYYCARQGANWELVYWGQGTLVTVSAASTKGPSVFPLAPSSKSTSGGTAALGCLVKDYFPEPVTVSWNSGALTSGVHTFPAVLQSSGLYSLSSVVTVPSSSLGTQTYICNVNHKPSNTKVDKKVEPKSCDKTHTCPPCPAPELLGGPSVFLFPPKPKDTLMISRTPEVTCVVVDVSHEDPEVKFNWYVDGVEVHNAKTKPREEQYNSTYRVVSVLTVLHQDWLNGKEYKCKVSNKALPAPIEKTISKAKGQPREPQVYTLPPSREEMTKNQVSLWCLVKGFYPSDIAVEWESNGQPENNYKTTPPVLDSDGSFFLYSKLTVDKSRWQQGNVFSCSVMHEALHNHYTQKSLSLSPGK

SEQ ID NO: 149 - protein, 214 aa, Artificial Sequence
  source: /note="Description of Artificial Sequence: Synthetic polypeptide"
DIVMTQSPATLSVTPGDRVFLSCRASQSISDFLHWYQQKSHESPRLLIKYASQSISGIPSRFSGSGSGSDFTLSINSVEPEDVGVYFCQNGHNFPPTFGGGTKLEIKRTVAAPSVFIFPPSDEQLKSGTASVVCLLNNFYPREAKVQWKVDNALQSGNSQESVTEQDSKDSTYSLSSTLTLSKADYEKHKVYACEVTHQGLSSPVTKSFNRGEC

SEQ ID NO: 150 - protein, 581 aa, Artificial Sequence; identical to SEQ ID NO: 130
  source: /note="Description of Artificial Sequence: Synthetic polypeptide"

SEQ ID NO: 151 - protein, 333 aa, Artificial Sequence; identical to SEQ ID NO: 131
  source: /note="Description of Artificial Sequence: Synthetic polypeptide"

SEQ ID NO: 152 - protein, 447 aa, Artificial Sequence
  source: /note="Description of Artificial Sequence: Synthetic polypeptide"
EVQLVESGGGLVMPGGSLKLSCAASGFAFSSYDMSWVRQTPEKRLEWVAYISGGGFTYYPDTVKGRFTLSRDNAKNTLYLQMSSLKSEDTAMYYCARQGANWELVYWGQGTLVTVSAASTKGPSVFPLAPSSKSTSGGTAALGCLVKDYFPEPVTVSWNSGALTSGVHTFPAVLQSSGLYSLSSVVTVPSSSLGTQTYICNVNHKPSNTKVDKKVEPKSCDKTHTSPPSPAPELLGGPSVFLFPPKPKDTLMISRTPEVTCVVVDVSHEDPEVKFNWYVDGVEVHNAKTKPREEQYNSTYRVVSVLTVLHQDWLNGKEYKCKVSNKALPAPIEKTISKAKGQPREPQVYTLPPSREEMTKNQVSLTCLVKGFYPSDIAVEWESNGQPENNYKTTPPVLDSDGSFRLYSKLTVDKSRWQQGNVFSCSVMHEALHNHYTQKSLSLSPGK

SEQ ID NO: 153 - protein, 214 aa, Artificial Sequence; identical to SEQ ID NO: 149
  source: /note="Description of Artificial Sequence: Synthetic polypeptide"

SEQ ID NO: 154 - protein, 581 aa, Artificial Sequence
  source: /note="Description of Artificial Sequence: Synthetic polypeptide"
QVQLKQSGPGLVQPSQSLSITCTVSGFSLTNYGVHWVRQSPGKGLEWLGVIWSGGNTDYNTPFTSRLSINKDNSKSQVFFKMNSLQSNDTAIYYCARALTYYDYEFAYWGQGTLVTVSAASTKGPSVFPLAPQVQLQQSGAELARPGASVKMSCKASGYTFTRYTMHWVKQRPGQGLEWIGYINPSRGYTNYNQKFKDKATLTTDKSSSTAYMQLSSLTSEDSAVYYCARYYDDHYCLDYWGQGTTLTVSSASTKGPSVFPLAPSSKSTSGGTAALGCLVKDYFPEPVTVSWNSGALTSGVHTFPAVLQSSGLYSLSSVVTVPSSSLGTQTYICNVNHKPSNTKVDKKVEPKSCDKTHTSPPSPAPELLGGPSVFLFPPKPKDTLMISRTPEVTCVVVDVSHEDPEVKFNWYVDGVEVHNAKTKPREEQYNSTYRVVSVLTVLHQDWLNGKEYKCKVSNKALPAPIEKTISKAKGQPREPQVYTLPPSREEMTKNQVSLTCLVKGFYPSDIAVEWESNGQPENNYKTTPPVLDSDGSFRLYSKLTVDKSRWQQGNVFSCSVMHEALHNHYTQKSLSLSPGK

SEQ ID NO: 155 - protein, 333 aa, Artificial Sequence; identical to SEQ ID NO: 131
  source: /note="Description of Artificial Sequence: Synthetic polypeptide"

SEQ ID NO: 156 - protein, 450 aa, Artificial Sequence
  source: /note="Description of Artificial Sequence: Synthetic polypeptide"
QVQLVESGGGVVQPGRSLRLDCKASGITFSNSGMHWVRQAPGKGLEWVAVIWYDGSKRYYADSVKGRFTISRDNSKNTLFLQMNSLRAEDTAVYYCATNDDYWGQGTLVTVSSASTELPPKVSVFVPPRDGFFGNPRKSKLICQATGFSPRQIQVSWLREGKQVGSGVTTDQVQAEAKESGPTTYKVTSTLTIKESDWLGQSMFTCRVDHRGLTFQQNASSMCDKTHTCPPCPAPEAAGGPSVFLFPPKPKDTLMISRTPEVTCVVVDVSHEDPEVKFNWYVDGVEVHNAKTKPREEQYNSTYRVVSVLTVLHQDWLNGKEYKCKVSNKALPAPIEKTISKAKGQPREPQVYTLPPSREEMTKNQVSLWCLVKGFYPSDIAVEWESNGQPENNYKTTPPVLDSDGSFFLYSKLTVDKSRWQQGNVFSCSVMHEALHNHYTQKSLSLSPGK

SEQ ID NO: 157 - protein, 217 aa, Artificial Sequence
  source: /note="Description of Artificial Sequence: Synthetic polypeptide"
EIVLTQSPATLSLSPGERATLSCRASQSVSSYLAWYQQKPGQAPRLLIYDASNRATGIPARFSGSGSGTDFTLTISSLEPEDFAVYYCQQSSNWPRTFGQGTKVEIKRTAELPPKVSVFVPPRDGFFGNPRKSKLICQATGFSPRQIQVSWLREGKQVGSGVTTDQVQAEAKESGPTTYKVTSTLTIKESDWLGQSMFTCRVDHRGLTFQQNASSMC

SEQ ID NO: 158 - protein, 581 aa, Artificial Sequence
  source: /note="Description of Artificial Sequence: Synthetic polypeptide"
QVQLKQSGPGLVQPSQSLSITCTVSGFSLTNYGVHWVRQSPGKGLEWLGVIWSGGNTDYNTPFTSRLSINKDNSKSQVFFKMNSLQSEDTAIYYCARALTYYDYEFAYWGQGTLVTVSAASTKGPSVFPLAPQVQLQQSGAELARPGASVKMSCKASGYTFTRYTMHWVKQRPGQGLEWIGYINPSRGYTNYNQKFKDKATLTTDKSSSTAYMQLSSLTSEDSAVYYCARYYDDHYSLDYWGQGTTLTVSSASTKGPSVFPLAPSSKSTSGGTAALGCLVKDYFPEPVTVSWNSGALTSGVHTFPAVLQSSGLYSLSSVVTVPSSSLGTQTYICNVNHKPSNTKVDKKVEPKSCDKTHTCPPCPAPEAAGGPSVFLFPPKPKDTLMISRTPEVTCVVVDVSHEDPEVKFNWYVDGVEVHNAKTKPREEQYNSTYRVVSVLTVLHQDWLNGKEYKCKVSNKALPAPIEKTISKAKGQPREPQVYTLPPSREEMTKNQVSLSCAVKGFYPSDIAVEWESNGQPENNYKTTPPVLDSDGSFFLVSKLTVDKSRWQQGNVFSCSVMHEALHNHYTQKSLSLSPGK

SEQ ID NO: 159 - protein, 333 aa, Artificial Sequence
  source: /note="Description of Artificial Sequence: Synthetic polypeptide"
DILLTQSPVILSVSPGERVSFSCRASQSIGTNIHWYQQRTSGSPRLLIKYASESISGIPSRFSGSGSGTDFTLSINSVESEDIADYYCQQNNNWPTTFGAGTKLELKRTVAAPSVFIFPPQIVLTQSPAIMSASPGEKVTMTCRASSSVSYMNWYQQKSGTSPKRWIYDTSKVASGVPYRFSGSGSGTSYSLTISSMEAEDAATYYCQQWSSNPLTFGSGTKLEIKRTVAAPSVFIFPPSDEQLKSGTASVVCLLNNFYPREAKVQWKVDNALQSGNSQESVTEQDSKDSTYSLSSTLTLSKADYEKHKVYACEVTHQGLSSPVTKSFNRGEC

SEQ ID NO: 160 - protein, 450 aa, Artificial Sequence
  source: /note="Description of Artificial Sequence: Synthetic polypeptide"
QVQLVESGGGVVQPGRSLRLDCKASGITFSNSGMHWVRQAPGKGLEWVAVIWYDGSKRYYADSVKGRFTISRDNSKNTLFLQMNSLRAEDTAVYYCATNDDYWGQGTLVTVSSASTELPPKVSVFVPPRDGFFGNPRKSELICEATGFSPRQIQVSWLREGKQVGSGVTTDQVQAEAKESGPTTYDVTSTLTIKESDWLGQSMFTCRVDHRGLTFQQNASSMCDKTHTCPPCPAPEAAGGPSVFLFPPKPKDTLMISRTPEVTCVVVDVSHEDPEVKFNWYVDGVEVHNAKTKPREEQYNSTYRVVSVLTVLHQDWLNGKEYKCKVSNKALPAPIEKTISKAKGQPREPQVYTLPPSREEMTKNQVSLWCLVKGFYPSDIAVEWESNGQPENNYKTTPPVLDSDGSFFLYSKLTVDKSRWQQGNVFSCSVMHEALHNHYTQKSLSLSPGK

SEQ ID NO: 161 - protein, 217 aa, Artificial Sequence
  source: /note="Description of Artificial Sequence: Synthetic polypeptide"
EIVLTQSPATLSLSPGERATLSCRASQSVSSYLAWYQQKPGQAPRLLIYDASNRATGIPARFSGSGSGTDFTLTISSLEPEDFAVYYCQQSSNWPRTFGQGTKVEIKRTAELPPKVSVFVPPRDGFFGNPRKSKLICKATGFSPRQIQVSWLREGKQVGSGVTTKQVQAEAKESGPTTYKVTSTLTIKESDWLGQSMFTCRVDHRGLTFQQNASSMC

SEQ ID NO: 162 - protein, 581 aa, Artificial Sequence; identical to SEQ ID NO: 158
  source: /note="Description of Artificial Sequence: Synthetic polypeptide"

SEQ ID NO: 163 - protein, 333 aa, Artificial Sequence; identical to SEQ ID NO: 159
  source: /note="Description of Artificial Sequence: Synthetic polypeptide"

SEQ ID NO: 164 - protein, 450 aa, Artificial Sequence
  source: /note="Description of Artificial Sequence: Synthetic polypeptide"
QVQLVESGGGVVQPGRSLRLDCKASGITFSNSGMHWVRQAPGKGLEWVAVIWYDGSKRYYADSVKGRFTISRDNSKNTLFLQMNSLRAEDTAVYYCATNDDYWGQGTLVTVSSASTELPPKVSVFVPPRDGFFGNPRKSKLICKATGFSPRQIQVSWLREGKQVGSGVTTKQVQAEAKESGPTTYKVTSTLTIKESDWLGQSMFTCRVDHRGLTFQQNASSMCDKTHTCPPCPAPEAAGGPSVFLFPPKPKDTLMISRTPEVTCVVVDVSHEDPEVKFNWYVDGVEVHNAKTKPREEQYNSTYRVVSVLTVLHQDWLNGKEYKCKVSNKALPAPIEKTISKAKGQPREPQVYTLPPSREEMTKNQVSLWCLVKGFYPSDIAVEWESNGQPENNYKTTPPVLDSDGSFFLYSKLTVDKSRWQQGNVFSCSVMHEALHNHYTQKSLSLSPGK

SEQ ID NO: 165 - protein, 217 aa, Artificial Sequence
  source: /note="Description of Artificial Sequence: Synthetic polypeptide"
EIVLTQSPATLSLSPGERATLSCRASQSVSSYLAWYQQKPGQAPRLLIYDASNRATGIPARFSGSGSGTDFTLTISSLEPEDFAVYYCQQSSNWPRTFGQGTKVEIKRTAELPPKVSVFVPPRDGFFGNPRKSELICEATGFSPRQIQVSWLREGKQVGSGVTTDQVQAEAKESGPTTYDVTSTLTIKESDWLGQSMFTCRVDHRGLTFQQNASSMC

SEQ ID NO: 166 - protein, 581 aa, Artificial Sequence; identical to SEQ ID NO: 158
  source: /note="Description of Artificial Sequence: Synthetic polypeptide"

SEQ ID NO: 167 - protein, 333 aa, Artificial Sequence; identical to SEQ ID NO: 159
  source: /note="Description of Artificial Sequence: Synthetic polypeptide"

SEQ ID NO: 168 - protein, 450 aa, Artificial Sequence
  source: /note="Description of Artificial Sequence: Synthetic polypeptide"
QVQLVESGGGVVQPGRSLRLDCKASGITFSNSGMHWVRQAPGKGLEWVAVIWYDGSKRYYADSVKGRFTISRDNSKNTLFLQMNSLRAEDTAVYYCATNDDYWGQGTLVTVSSASTELPPKVSVFVPPRDGFFGNPRKSKLACSATGFSPRQIQVSWLREGKQVGSGVTTDQVQAEAKESGPTTYKVASTLTIKESDWLGQSMFTCRVDHRGLTFQQNASSMCDKTHTCPPCPAPEAAGGPSVFLFPPKPKDTLMISRTPEVTCVVVDVSHEDPEVKFNWYVDGVEVHNAKTKPREEQYNSTYRVVSVLTVLHQDWLNGKEYKCKVSNKALPAPIEKTISKAKGQPREPQVYTLPPSREEMTKNQVSLWCLVKGFYPSDIAVEWESNGQPENNYKTTPPVLDSDGSFFLYSKLTVDKSRWQQGNVFSCSVMHEALHNHYTQKSLSLSPGK

SEQ ID NO: 169 - protein, 217 aa, Artificial Sequence
  source: /note="Description of Artificial Sequence: Synthetic polypeptide"
EIVLTQSPATLSLSPGERATLSCRASQSVSSYLAWYQQKPGQAPRLLIYDASNRATGIPARFSGSGSGTDFTLTISSLEPEDFAVYYCQQSSNWPRTFGQGTKVEIKRTAELPPKVSVFVPPRDGFFGNPRKSKLWCQATGFSPRQIQVSWLREGKQVGSGVTTDQVQAEAKESGPTTYKVTSTLTIKESDWLGQSMFTCRVDHRGLTFQQNASSMC

SEQ ID NO: 170 - protein, 581 aa, Artificial Sequence; identical to SEQ ID NO: 158
  source: /note="Description of Artificial Sequence: Synthetic polypeptide"

SEQ ID NO: 171 - protein, 333 aa, Artificial Sequence; identical to SEQ ID NO: 159
  source: /note="Description of Artificial Sequence: Synthetic polypeptide"

SEQ ID NO: 172 - protein, 450 aa, Artificial Sequence
  source: /note="Description of Artificial Sequence: Synthetic polypeptide"
QVQLVESGGGVVQPGRSLRLDCKASGITFSNSGMHWVRQAPGKGLEWVAVIWYDGSKRYYADSVKGRFTISRDNSKNTLFLQMNSLRAEDTAVYYCATNDDYWGQGTLVTVSSASTELPPKVSVFVPPRDGFFGNPRKSKLWCQATGFSPRQIQVSWLREGKQVGSGVTTDQVQAEAKESGPTTYKVTSTLTIKESDWLGQSMFTCRVDHRGLTFQQNASSMCDKTHTCPPCPAPEAAGGPSVFLFPPKPKDTLMISRTPEVTCVVVDVSHEDPEVKFNWYVDGVEVHNAKTKPREEQYNSTYRVVSVLTVLHQDWLNGKEYKCKVSNKALPAPIEKTISKAKGQPREPQVYTLPPSREEMTKNQVSLWCLVKGFYPSDIAVEWESNGQPENNYKTTPPVLDSDGSFFLYSKLTVDKSRWQQGNVFSCSVMHEALHNHYTQKSLSLSPGK

SEQ ID NO: 173 - protein, 217 aa, Artificial Sequence
  source: /note="Description of Artificial Sequence: Synthetic polypeptide"
EIVLTQSPATLSLSPGERATLSCRASQSVSSYLAWYQQKPGQAPRLLIYDASNRATGIPARFSGSGSGTDFTLTISSLEPEDFAVYYCQQSSNWPRTFGQGTKVEIKRTAELPPKVSVFVPPRDGFFGNPRKSKLACSATGFSPRQIQVSWLREGKQVGSGVTTDQVQAEAKESGPTTYKVASTLTIKESDWLGQSMFTCRVDHRGLTFQQNASSMC

SEQ ID NO: 174 - protein, 581 aa, Artificial Sequence; identical to SEQ ID NO: 158
  source: /note="Description of Artificial Sequence: Synthetic polypeptide"

SEQ ID NO: 175 - protein, 333 aa, Artificial Sequence; identical to SEQ ID NO: 159
  source: /note="Description of Artificial Sequence: Synthetic polypeptide"

SEQ ID NO: 176 - protein, 455 aa, Artificial Sequence
  source: /note="Description of Artificial Sequence: Synthetic polypeptide"
EVQLVESGGGLVQPGGSLRLSCAASGFTFSDSWIHWVRQAPGKGLEWVAWISPYGGSTYYADSVKGRFTISADTSKNTAYLQMNSLRAEDTAVYYCARRHYPGGFDYWGQGTLVTVSAASTELPPKVSVFVPPRDGFFGNPRKSKLICQATGFSPRQIQVSWLREGKQVGSGVTTDQVQAEAKESGPTTYKVTSTLTIKESDWLGQSMFTCRVDHRGLTFQQNASSMCDKTHTCPPCPAPEAAGGPSVFLFPPKPKDTLMISRTPEVTCVVVDVSHEDPEVKFNWYVDGVEVHNAKTKPREEQYNSTYRVVSVLTVLHQDWLNGKEYKCKVSNKALPAPIEKTISKAKGQPREPQVYTLPPSREEMTKNQVSLWCLVKGFYPSDIAVEWESNGQPENNYKTTPPVLDSDGSFFLYSKLTVDKSRWQQGNVFSCSVMHEALHNHYTQKSLSLSPGK

SEQ ID NO: 177 - protein, 217 aa, Artificial Sequence
  source: /note="Description of Artificial Sequence: Synthetic polypeptide"
DIQMTQSPSSLSASVGDRVTITCRASQDVSTAVAWYQQKPGKAPKLLIYSASFLYSGVPSRFSGSGSGTDFTLTISSLQPEDFATYYCQQYLYHPATFGQGTKVEIKRTAELPPKVSVFVPPRDGFFGNPRKSKLICQATGFSPRQIQVSWLREGKQVGSGVTTDQVQAEAKESGPTTYKVTSTLTIKESDWLGQSMFTCRVDHRGLTFQQNASSMC

SEQ ID NO: 178 - protein, 581 aa, Artificial Sequence; identical to SEQ ID NO: 158
  source: /note="Description of Artificial Sequence: Synthetic polypeptide"

SEQ ID NO: 179 - protein, 333 aa, Artificial Sequence; identical to SEQ ID NO: 159
  source: /note="Description of Artificial Sequence: Synthetic polypeptide"

SEQ ID NO: 180 - protein, 455 aa, Artificial Sequence
  source: /note="Description of Artificial Sequence: Synthetic polypeptide"
EVQLVESGGGLVQPGGSLRLSCAASGFTFSDSWIHWVRQAPGKGLEWVAWISPYGGSTYYADSVKGRFTISADTSKNTAYLQMNSLRAEDTAVYYCARRHYPGGFDYWGQGTLVTVSAASTELPPKVSVFVPPRDGFFGNPRKSELICEATGFSPRQIQVSWLREGKQVGSGVTTDQVQAEAKESGPTTYDVTSTLTIKESDWLGQSMFTCRVDHRGLTFQQNASSMCDKTHTCPPCPAPEAAGGPSVFLFPPKPKDTLMISRTPEVTCVVVDVSHEDPEVKFNWYVDGVEVHNAKTKPREEQYNSTYRVVSVLTVLHQDWLNGKEYKCKVSNKALPAPIEKTISKAKGQPREPQVYTLPPSREEMTKNQVSLWCLVKGFYPSDIAVEWESNGQPENNYKTTPPVLDSDGSFFLYSKLTVDKSRWQQGNVFSCSVMHEALHNHYTQKSLSLSPGK

SEQ ID NO: 181 - protein, 217 aa, Artificial Sequence
  source: /note="Description of Artificial Sequence: Synthetic polypeptide"
DIQMTQSPSSLSASVGDRVTITCRASQDVSTAVAWYQQKPGKAPKLLIYSASFLYSGVPSRFSGSGSGTDFTLTISSLQPEDFATYYCQQYLYHPATFGQGTKVEIKRTAELPPKVSVFVPPRDGFFGNPRKSKLICKATGFSPRQIQVSWLREGKQVGSGVTTKQVQAEAKESGPTTYKVTSTLTIKESDWLGQSMFTCRVDHRGLTFQQNASSMC

SEQ ID NO: 182 - protein, 581 aa, Artificial Sequence; identical to SEQ ID NO: 158
  source: /note="Description of Artificial Sequence: Synthetic polypeptide"

SEQ ID NO: 183 - protein, 333 aa, Artificial Sequence; identical to SEQ ID NO: 159
  source: /note="Description of Artificial Sequence: Synthetic polypeptide"

SEQ ID NO: 184 - protein, 455 aa, Artificial Sequence
  source: /note="Description of Artificial Sequence: Synthetic polypeptide"
EVQLVESGGGLVQPGGSLRLSCAASGFTFSDSWIHWVRQAPGKGLEWVAWISPYGGSTYYADSVKGRFTISADTSKNTAYLQMNSLRAEDTAVYYCARRHYPGGFDYWGQGTLVTVSAASTELPPKVSVFVPPRDGFFGNPRKSKLICKATGFSPRQIQVSWLREGKQVGSGVTTKQVQAEAKESGPTTYKVTSTLTIKESDWLGQSMFTCRVDHRGLTFQQNASSMCDKTHTCPPCPAPEAAGGPSVFLFPPKPKDTLMISRTPEVTCVVVDVSHEDPEVKFNWYVDGVEVHNAKTKPREEQYNSTYRVVSVLTVLHQDWLNGKEYKCKVSNKALPAPIEKTISKAKGQPREPQVYTLPPSREEMTKNQVSLWCLVKGFYPSDIAVEWESNGQPENNYKTTPPVLDSDGSFFLYSKLTVDKSRWQQGNVFSCSVMHEALHNHYTQKSLSLSPGK

SEQ ID NO: 185 - protein, 217 aa, Artificial Sequence
  source: /note="Description of Artificial Sequence: Synthetic polypeptide"
DIQMTQSPSSLSASVGDRVTITCRASQDVSTAVAWYQQKPGKAPKLLIYSASFLYSGVPSRFSGSGSGTDFTLTISSLQPEDFATYYCQQYLYHPATFGQGTKVEIKRTAELPPKVSVFVPPRDGFFGNPRKSELICEATGFSPRQIQVSWLREGKQVGSGVTTDQVQAEAKESGPTTYDVTSTLTIKESDWLGQSMFTCRVDHRGLTFQQNASSMC

SEQ ID NO: 186 - protein, 581 aa, Artificial Sequence; identical to SEQ ID NO: 158
  source: /note="Description of Artificial Sequence: Synthetic polypeptide"

SEQ ID NO: 187 - protein, 333 aa, Artificial Sequence; identical to SEQ ID NO: 159
  source: /note="Description of Artificial Sequence: Synthetic polypeptide"

SEQ ID NO: 188 - protein, 455 aa, Artificial Sequence
  source: /note="Description of Artificial Sequence: Synthetic polypeptide"
EVQLVESGGGLVQPGGSLRLSCAASGFTFSDSWIHWVRQAPGKGLEWVAWISPYGGSTYYADSVKGRFTISADTSKNTAYLQMNSLRAEDTAVYYCARRHYPGGFDYWGQGTLVTVSAASTELPPKVSVFVPPRDGFFGNPRKSKLACSATGFSPRQIQVSWLREGKQVGSGVTTDQVQAEAKESGPTTYKVASTLTIKESDWLGQSMFTCRVDHRGLTFQQNASSMCDKTHTCPPCPAPEAAGGPSVFLFPPKPKDTLMISRTPEVTCVVVDVSHEDPEVKFNWYVDGVEVHNAKTKPREEQYNSTYRVVSVLTVLHQDWLNGKEYKCKVSNKALPAPIEKTISKAKGQPREPQVYTLPPSREEMTKNQVSLWCLVKGFYPSDIAVEWESNGQPENNYKTTPPVLDSDGSFFLYSKLTVDKSRWQQGNVFSCSVMHEALHNHYTQKSLSLSPGK

SEQ ID NO: 189 - protein, 217 aa, Artificial Sequence
  source: /note="Description of Artificial Sequence: Synthetic polypeptide"
DIQMTQSPSSLSASVGDRVTITCRASQDVSTAVAWYQQKPGKAPKLLIYSASFLYSGVPSRFSGSGSGTDFTLTISSLQPEDFATYYCQQYLYHPATFGQGTKVEIKRTAELPPKVSVFVPPRDGFFGNPRKSKLWCQATGFSPRQIQVSWLREGKQVGSGVTTDQVQAEAKESGPTTYKVTSTLTIKESDWLGQSMFTCRVDHRGLTFQQNASSMC

SEQ ID NO: 190 - protein, 581 aa, Artificial Sequence; identical to SEQ ID NO: 158
  source: /note="Description of Artificial Sequence: Synthetic polypeptide"

SEQ ID NO: 191 - protein, 333 aa, Artificial Sequence; identical to SEQ ID NO: 159
  source: /note="Description of Artificial Sequence: Synthetic polypeptide"

SEQ ID NO: 192 - protein, 455 aa, Artificial Sequence
  source: /note="Description of Artificial Sequence: Synthetic polypeptide"
EVQLVESGGGLVQPGGSLRLSCAASGFTFSDSWIHWVRQAPGKGLEWVAWISPYGGSTYYADSVKGRFTISADTSKNTAYLQMNSLRAEDTAVYYCARRHYPGGFDYWGQGTLVTVSAASTELPPKVSVFVPPRDGFFGNPRKSKLWCQATGFSPRQIQVSWLREGKQVGSGVTTDQVQAEAKESGPTTYKVTSTLTIKESDWLGQSMFTCRVDHRGLTFQQNASSMCDKTHTCPPCPAPEAAGGPSVFLFPPKPKDTLMISRTPEVTCVVVDVSHEDPEVKFNWYVDGVEVHNAKTKPREEQYNSTYRVVSVLTVLHQDWLNGKEYKCKVSNKALPAPIEKTISKAKGQPREPQVYTLPPSREEMTKNQVSLWCLVKGFYPSDIAVEWESNGQPENNYKTTPPVLDSDGSFFLYSKLTVDKSRWQQGNVFSCSVMHEALHNHYTQKSLSLSPGK

SEQ ID NO: 193 - protein, 217 aa, Artificial Sequence
  source: /note="Description of Artificial Sequence: Synthetic polypeptide"
DIQMTQSPSSLSASVGDRVTITCRASQDVSTAVAWYQQKPGKAPKLLIYSASFLYSGVPSRFSGSGSGTDFTLTISSLQPEDFATYYCQQYLYHPATFGQGTKVEIKRTAELPPKVSVFVPPRDGFFGNPRKSKLACSATGFSPRQIQVSWLREGKQVGSGVTTDQVQAEAKESGPTTYKVASTLTIKESDWLGQSMFTCRVDHRGLTFQQNASSMC

SEQ ID NO: 194 - protein, 581 aa, Artificial Sequence; identical to SEQ ID NO: 158
  source: /note="Description of Artificial Sequence: Synthetic polypeptide"

SEQ ID NO: 195 - protein, 333 aa, Artificial Sequence; identical to SEQ ID NO: 159
  source: /note="Description of Artificial Sequence: Synthetic polypeptide"

SEQ ID NO: 196 - protein, 455 aa, Artificial Sequence; identical to SEQ ID NO: 176
  source: /note="Description of Artificial Sequence: Synthetic polypeptide"

SEQ ID NO: 197 - protein, 217 aa, Artificial Sequence; identical to SEQ ID NO: 177
  source: /note="Description of Artificial Sequence: Synthetic polypeptide"

SEQ ID NO: 198 - protein, 581 aa, Artificial Sequence
  source: /note="Description of Artificial Sequence: Synthetic polypeptide"
QVQLKQSGPGLVQPSQSLSITCTVSGFSLTNYGVHWVRQSPGKGLEWLGVIWSGGNTDYNTPFTSRLSINKDNSKSQVFFKMNSLQSNDTAIYYCARALTYYDYEFAYWGQGTLVTVSAASTKGPSVFPLAPQVQLQQSGAELARPGASVKMSCKASGYTFTRYTMHWVKQRPGQGLEWIGYINPSRGYTNYNQKFKDKATLTTDKSSSTAYMQLSSLTSEDSAVYYCARYYDDHYCLDYWGQGTTLTVSSASTKGPSVFPLAPSSKSTSGGTAALGCLVKDYFPEPVTVSWNSGALTSGVHTFPAVLQSSGLYSLSSVVTVPSSSLGTQTYICNVNHKPSNTKVDKKVEPKSCDKTHTCPPCPAPEAAGGPSVFLFPPKPKDTLMISRTPEVTCVVVDVSHEDPEVKFNWYVDGVEVHNAKTKPREEQYNSTYRVVSVLTVLHQDWLNGKEYKCKVSNKALPAPIEKTISKAKGQPREPQVYTLPPSREEMTKNQVSLSCAVKGFYPSDIAVEWESNGQPENNYKTTPPVLDSDGSFFLVSKLTVDKSRWQQGNVFSCSVMHEALHNHYTQKSLSLSPGK

SEQ ID NO: 199 - protein, 333 aa, Artificial Sequence; identical to SEQ ID NO: 131
  source: /note="Description of Artificial Sequence: Synthetic polypeptide"

SEQ ID NO: 200 - protein, 455 aa, Artificial Sequence; identical to SEQ ID NO: 180
  source: /note="Description of Artificial Sequence: Synthetic polypeptide"

SEQ ID NO: 201 - protein, 217 aa, Artificial Sequence; identical to SEQ ID NO: 181
  source: /note="Description of Artificial Sequence: Synthetic polypeptide"

SEQ ID NO: 202 - protein, 581 aa, Artificial Sequence; identical to SEQ ID NO: 198
  source: /note="Description of Artificial Sequence: Synthetic polypeptide"

SEQ ID NO: 203 - protein, 333 aa, Artificial Sequence; identical to SEQ ID NO: 131
  source: /note="Description of Artificial Sequence: Synthetic polypeptide"

SEQ ID NO: 204 - protein, 455 aa, Artificial Sequence; identical to SEQ ID NO: 184
  source: /note="Description of Artificial Sequence: Synthetic polypeptide"

SEQ ID NO: 205 - protein, 217 aa, Artificial Sequence; identical to SEQ ID NO: 185
  source: /note="Description of Artificial Sequence: Synthetic polypeptide"

SEQ ID NO: 206 - protein, 581 aa, Artificial Sequence; identical to SEQ ID NO: 198
  source: /note="Description of Artificial Sequence: Synthetic polypeptide"

SEQ ID NO: 207 - protein, 333 aa, Artificial Sequence; identical to SEQ ID NO: 131
  source: /note="Description of Artificial Sequence: Synthetic polypeptide"

SEQ ID NO: 208 - protein, 455 aa, Artificial Sequence; identical to SEQ ID NO: 188
  source: /note="Description of Artificial Sequence: Synthetic polypeptide"

SEQ ID NO: 209 - protein, 217 aa, Artificial Sequence; identical to SEQ ID NO: 189
  source: /note="Description of Artificial Sequence: Synthetic polypeptide"

SEQ ID NO: 210 - protein, 581 aa, Artificial Sequence; identical to SEQ ID NO: 198
  source: /note="Description of Artificial Sequence: Synthetic polypeptide"

SEQ ID NO: 211 - protein, 333 aa, Artificial Sequence; identical to SEQ ID NO: 131
  source: /note="Description of Artificial Sequence: Synthetic polypeptide"

SEQ ID NO: 212 - protein, 455 aa, Artificial Sequence; identical to SEQ ID NO: 192
  source: /note="Description of Artificial Sequence: Synthetic polypeptide"

SEQ ID NO: 213 - protein, 217 aa, Artificial Sequence; identical to SEQ ID NO: 193
  source: /note="Description of Artificial Sequence: Synthetic polypeptide"

SEQ ID NO: 214 - protein, 581 aa, Artificial Sequence; identical to SEQ ID NO: 198
  source: /note="Description of Artificial Sequence: Synthetic polypeptide"

SEQ ID NO: 215 - protein, 333 aa, Artificial Sequence; identical to SEQ ID NO: 131
  source: /note="Description of Artificial Sequence: Synthetic polypeptide"

SEQ ID NO: 216 - protein, 450 aa, Artificial Sequence; identical to SEQ ID NO: 156
  source: /note="Description of Artificial Sequence: Synthetic polypeptide"

SEQ ID NO: 217 - protein, 217 aa, Artificial Sequence; identical to SEQ ID NO: 157
  source: /note="Description of Artificial Sequence: Synthetic polypeptide"

SEQ ID NO: 218 - protein, 581 aa, Artificial Sequence; identical to SEQ ID NO: 198
  source: /note="Description of Artificial Sequence: Synthetic polypeptide"

SEQ ID NO: 219 - protein, 333 aa, Artificial Sequence; identical to SEQ ID NO: 131
  source: /note="Description of Artificial Sequence: Synthetic polypeptide"

SEQ ID NO: 220 - protein, 450 aa, Artificial Sequence; identical to SEQ ID NO: 160
  source: /note="Description of Artificial Sequence: Synthetic polypeptide"

SEQ ID NO: 221 - protein, 217 aa, Artificial Sequence; identical to SEQ ID NO: 161
  source: /note="Description of Artificial Sequence: Synthetic polypeptide"

SEQ ID NO: 222 - protein, 581 aa, Artificial Sequence; identical to SEQ ID NO: 198
  source: /note="Description of Artificial Sequence: Synthetic polypeptide"

SEQ ID NO: 223 - protein, 333 aa, Artificial Sequence; identical to SEQ ID NO: 131
  source: /note="Description of Artificial Sequence: Synthetic polypeptide"

SEQ ID NO: 224 - protein, 450 aa, Artificial Sequence; identical to SEQ ID NO: 164
  source: /note="Description of Artificial Sequence: Synthetic polypeptide"

SEQ ID NO: 225 - protein, 217 aa, Artificial Sequence; identical to SEQ ID NO: 165
  source: /note="Description of Artificial Sequence: Synthetic polypeptide"

SEQ ID NO: 226 - protein, 581 aa, Artificial Sequence; identical to SEQ ID NO: 198
  source: /note="Description of Artificial Sequence: Synthetic polypeptide"

SEQ ID NO: 227 - protein, 333 aa, Artificial Sequence; identical to SEQ ID NO: 131
  source: /note="Description of Artificial Sequence: Synthetic polypeptide"

SEQ ID NO: 228 - protein, 450 aa, Artificial Sequence; identical to SEQ ID NO: 168
  source: /note="Description of Artificial Sequence: Synthetic polypeptide"

SEQ ID NO: 229 - protein, 217 aa, Artificial Sequence; identical to SEQ ID NO: 169
  source: /note="Description of Artificial Sequence: Synthetic polypeptide"

SEQ ID NO: 230 - protein, 581 aa, Artificial Sequence; identical to SEQ ID NO: 198
  source: /note="Description of Artificial Sequence: Synthetic polypeptide"

SEQ ID NO: 231 - protein, 333 aa, Artificial Sequence; identical to SEQ ID NO: 131
  source: /note="Description of Artificial Sequence: Synthetic polypeptide"

SEQ ID NO: 232 - protein, 450 aa, Artificial Sequence; identical to SEQ ID NO: 172
  source: /note="Description of Artificial Sequence: Synthetic polypeptide"

SEQ ID NO: 233 - protein, 217 aa, Artificial Sequence; identical to SEQ ID NO: 173
  source: /note="Description of Artificial Sequence: Synthetic polypeptide"

SEQ ID NO: 234 - protein, 581 aa, Artificial Sequence; identical to SEQ ID NO: 198
  source: /note="Description of Artificial Sequence: Synthetic polypeptide"

SEQ ID NO: 235 - protein, 333 aa, Artificial Sequence; identical to SEQ ID NO: 131
  source: /note="Description of Artificial Sequence: Synthetic polypeptide"

SEQ ID NO: 236 - protein, 443 aa, Artificial Sequence
  source: /note="Description of Artificial Sequence: Synthetic polypeptide"
QVQLVESGGGVVQPGRSLRLDCKASGITFSNSGMHWVRQAPGKGLEWVAVIWYDGSKRYYADSVKGRFTISRDNSKNTLFLQMNSLRAEDTAVYYCATNDDYWGQGTLVTVSSASTKGPSVFPLAPSSKSTSGGTAALGCLVKDYFPEPVTVSWNSGALTSGVHTFPAVLQSSGLYSLSSVVTVPSSSLGTQTYICNVNHKPSNTKVDKKVEPKSCDKTHTCPPCPAPEAAGGPSVFLFPPKPKDTLMISRTPEVTCVVVDVSHEDPEVKFNWYVDGVEVHNAKTKPREEQYNSTYRVVSVLTVLHQDWLNGKEYKCKVSNKALPAPIEKTISKAKGQPREPQVYTLPPSREEMTKNQVSLWCLVKGFYPSDIAVEWESNGQPENNYKTTPPVLDSDGSFFLYSKLTVDKSRWQQGNVFSCSVMHEALHNHYTQKSLSLSPGK

SEQ ID NO: 237 - protein, 214 aa, Artificial Sequence
  source: /note="Description of Artificial Sequence: Synthetic polypeptide"
EIVLTQSPATLSLSPGERATLSCRASQSVSSYLAWYQQKPGQAPRLLIYDASNRATGIPARFSGSGSGTDFTLTISSLEPEDFAVYYCQQSSNWPRTFGQGTKVEIKRTVAAPSVFIFPPSDEQLKSGTASVVCLLNNFYPREAKVQWKVDNALQSGNSQESVTEQDSKDSTYSLSSTLTLSKADYEKHKVYACEVTHQGLSSPVTKSFNRGEC

SEQ ID NO: 238 - protein, 581 aa, Artificial Sequence; identical to SEQ ID NO: 158
  source: /note="Description of Artificial Sequence: Synthetic polypeptide"

SEQ ID NO: 239 - protein, 333 aa, Artificial Sequence; identical to SEQ ID NO: 159
  source: /note="Description of Artificial Sequence: Synthetic polypeptide"

SEQ ID NO: 240 - protein, 448 aa, Artificial Sequence
  source: /note="Description of Artificial Sequence: Synthetic polypeptide"
EVQLVESGGGLVQPGGSLRLSCAASGFTFSDSWIHWVRQAPGKGLEWVAWISPYGGSTYYADSVKGRFTISADTSKNTAYLQMNSLRAEDTAVYYCARRHYPGGFDYWGQGTLVTVSAASTKGPSVFPLAPSSKSTSGGTAALGCLVKDYFPEPVTVSWNSGALTSGVHTFPAVLQSSGLYSLSSVVTVPSSSLGTQTYICNVNHKPSNTKVDKKVEPKSCDKTHTCPPCPAPEAAGGPSVFLFPPKPKDTLMISRTPEVTCVVVDVSHEDPEVKFNWYVDGVEVHNAKTKPREEQYNSTYRVVSVLTVLHQDWLNGKEYKCKVSNKALPAPIEKTISKAKGQPREPQVYTLPPSREEMTKNQVSLWCLVKGFYPSDIAVEWESNGQPENNYKTTPPVLDSDGSFFLYSKLTVDKSRWQQGNVFSCSVMHEALHNHYTQKSLSLSPGK

SEQ ID NO: 241 - protein, 214 aa, Artificial Sequence
  source: /note="Description of Artificial Sequence: Synthetic polypeptide"
DIQMTQSPSSLSASVGDRVTITCRASQDVSTAVAWYQQKPGKAPKLLIYSASFLYSGVPSRFSGSGSGTDFTLTISSLQPEDFATYYCQQYLYHPATFGQGTKVEIKRTVAAPSVFIFPPSDEQLKSGTASVVCLLNNFYPREAKVQWKVDNALQSGNSQESVTEQDSKDSTYSLSSTLTLSKADYEKHKVYACEVTHQGLSSPVTKSFNRGEC

SEQ ID NO: 242 - protein, 581 aa, Artificial Sequence; identical to SEQ ID NO: 158
  source: /note="Description of Artificial Sequence: Synthetic polypeptide"

SEQ ID NO: 243 - protein, 333 aa, Artificial Sequence; identical to SEQ ID NO: 159
  source: /note="Description of Artificial Sequence: Synthetic polypeptide"

SEQ ID NO: 244 - protein, 448 aa, Artificial Sequence; identical to SEQ ID NO: 240
  source: /note="Description of Artificial Sequence: Synthetic polypeptide"

SEQ ID NO: 245 - protein, 214 aa, Artificial Sequence; identical to SEQ ID NO: 241
  source: /note="Description of Artificial Sequence: Synthetic polypeptide"

SEQ ID NO: 246 - protein, 581 aa, Artificial Sequence; identical to SEQ ID NO: 198
  source: /note="Description of Artificial Sequence: Synthetic polypeptide"

SEQ ID NO: 247 - protein, 333 aa, Artificial Sequence; identical to SEQ ID NO: 131
  source: /note="Description of Artificial Sequence: Synthetic polypeptide"

SEQ ID NO: 248 - protein, 443 aa, Artificial Sequence; identical to SEQ ID NO: 236
  source: /note="Description of Artificial Sequence: Synthetic polypeptide"

SEQ ID NO: 249 - protein, 214 aa, Artificial Sequence; identical to SEQ ID NO: 237
  source: /note="Description of Artificial Sequence: Synthetic polypeptide"

SEQ ID NO: 250 - protein, 581 aa, Artificial Sequence; identical to SEQ ID NO: 198
  source: /note="Description of Artificial Sequence: Synthetic polypeptide"

SEQ ID NO: 251 - protein, 333 aa, Artificial Sequence; identical to SEQ ID NO: 131
  source: /note="Description of Artificial Sequence: Synthetic polypeptide"

SEQ ID NO: 252 - protein, 578 aa, Artificial Sequence
  source: /note="Description of Artificial Sequence: Synthetic polypeptide"
EVQLLESGGDLVRPGGSLRLSCAASGFSFSRYGMSWVRQAPGKGLDWVAHISASAGATYYADSVKGRFTISRDNSKNTLFLQMNNLRADDTAIYYCAKGGKQWLIPWFDPWGQGTLVTVSSASTKGPEVQLLESGGDLVRPGGSLRLSCAASGFSFSRYGMSWVRQAPGKGLDWVAHISASAGATYYADSVKGRFTISRDNSKNTLFLQMNNLRADDTAIYYCAKGGKQWLIPWFDPWGQGTLVTVSSASTKGPSVFPLAPSSKSTSGGTAALGCLVKDYFPEPVTVSWNSGALTSGVHTFPAVLQSSGLYSLSSVVTVPSSSLGTQTYICNVNHKPSNTKVDKKVEPKSCDKTHTCPPCPAPELLGGPSVFLFPPKPKDTLMISRTPEVTCVVVDVSHEDPEVKFNWYVDGVEVHNAKTKPREEQYNSTYRVVSVLTVLHQDWLNGKEYKCKVSNKALPAPIEKTISKAKGQPREPQVYTLPPSREEMTKNQVSLTCLVKGFYPSDIAVEWESNGQPENNYKTTPPVLDSDGSFFLYSKLTVDKSRWQQGNVFSCSVMHEALHNHYTQKSLSLSPGK

SEQ ID NO: 253 - protein, 327 aa, Artificial Sequence
  source: /note="Description of Artificial Sequence: Synthetic polypeptide"
DIQMTQSPSSVSASVGDRVTIACRASQDISDRLAWYQQKPGKVPKVLIYGASSLQSGVPSRFSGSGSGTDFTLTINSLQPEDFATYYCQQANSFPLTFGGGTKVEMKRTVAAPDIQMTQSPSSVSASVGDRVTIACRASQDISDRLAWYQQKPGKVPKVLIYGASSLQSGVPSRFSGSGSGTDFTLTINSLQPEDFATYYCQQANSFPLTFGGGTKVEMKRTVAAPSVFIFPPSDEQLKSGTASVVCLLNNFYPREAKVQWKVDNALQSGNSQESVTEQDSKDSTYSLSSTLTLSKADYEKHKVYACEVTHQGLSSPVTKSFNRGEC

SEQ ID NO: 254 - protein, 119 aa, Artificial Sequence [sequence omitted]

SEQ ID NO: 255 - protein, 106 aa, Artificial Sequence; identical to SEQ ID NO: 117
  source: /note="Description of Artificial Sequence: Synthetic polypeptide"

SEQ ID NO: 256 - protein, 119 aa, Artificial Sequence; identical to SEQ ID NO: 66
  source: /note="Description of Artificial Sequence: Synthetic polypeptide"

SEQ ID NO: 257 - protein, 107 aa, Artificial Sequence; identical to SEQ ID NO: 67
  source: /note="Description of Artificial Sequence: Synthetic polypeptide"

SEQ ID NO: 258 - protein, 121 aa, Artificial Sequence [sequence omitted]

SEQ ID NO: 259 - protein, 109 aa, Artificial Sequence [sequence omitted]

SEQ ID NO: 260 - protein, 117 aa, Artificial Sequence; identical to SEQ ID NO: 122
  source: /note="Description of Artificial Sequence: Synthetic polypeptide"

SEQ ID NO: 261 - protein, 107 aa, Artificial Sequence; identical to SEQ ID NO: 123
  source: /note="Description of Artificial Sequence: Synthetic polypeptide"

SEQ ID NO: 262 - protein, 588 aa, Artificial Sequence
  source: /note="Description of Artificial Sequence: Synthetic polypeptide"
QVQLQQWGAGLLKPSETLSLTCAVYGGSFSGYYWSWIRQSPEKGLEWIGEINHGGYVTYNPSLESRVTISVDTSKNQFSLKLSSVTAADTAVYYCARDYGPGNYDWYFDLWGRGTLVTVSSASTKGPSVFPLAPEVQLVESGGGLVQPGGSLRLSCAASGFAFSSYDMSWVRQAPGKGLEWVSYISGGGFTYYPDTVKGRFTISRDNSKNTLYLQMNSLRAEDTAVYYCARQGANWELVYWGQGTLVTVSSASTELPPKVSVFVPPRDGFFGNPRKSELICEATGFSPRQIQVSWLREGKQVGSGVTTDQVQAEAKESGPTTYDVTSTLTIKESDWLGQSMFTCRVDHRGLTFQQNASSMCDKTHTCPPCPAPELLGGPSVFLFPPKPKDTLMISRTPEVTCVVVDVSHEDPEVKFNWYVDGVEVHNAKTKPREEQYNSTYRVVSVLTVLHQDWLNGKEYKCKVSNKALPAPIEKTISKAKGQPREPQVYTLPPSREEMTKNQVSLWCLVKGFYPSDIAVEWESNGQPENNYKTTPPVLDSDGSFFLYSKLTVDKSRWQQGNVFSCSVMHEALHNHYTQKSLSLSPGK

SEQ ID NO: 263 - protein, 339 aa, Artificial Sequence
  source: /note="Description of Artificial Sequence: Synthetic polypeptide"
EIVLTQSPATLSLSPGERATLSCRASQSVSSYLAWYQQKPGQAPRLLIYDASNRATGIPARFSGSGSGTDFTLTISSLEPEDFAVYYCQQRSNWPPALTFGGGTKVEIKRTVAAPSVFIFPPEIVLTQSPATLSLSPGERATLSCRASQSISDFLHWYQQKPGQAPRLLIKYASQSISGIPARFSGSGSGTDFTLTISSLEPEDFAVYYCQNGHNFPPTFGGGTKVEIKRTAELPPKVSVFVPPRDGFFGNPRKSKLICKATGFSPRQIQVSWLREGKQVGSGVTTKQVQAEAKESGPTTYKVTSTLTIKESDWLGQSMFTCRVDHRGLTFQQNASSMC

SEQ ID NO: 264 - protein, 581 aa, Artificial Sequence; identical to SEQ ID NO: 130
  source: /note="Description of Artificial Sequence: Synthetic polypeptide"

SEQ ID NO: 265 - protein, 333 aa, Artificial Sequence; identical to SEQ ID NO: 131
  source: /note="Description of Artificial Sequence: Synthetic polypeptide"

SEQ ID NO: 266 - protein, 588 aa, Artificial Sequence; identical to SEQ ID NO: 262
  source: /note="Description of Artificial Sequence: Synthetic polypeptide"

SEQ ID NO: 267 - protein, 332 aa, Artificial Sequence
  source: /note="Description of Artificial Sequence: Synthetic polypeptide"
EIVLTQSPATLSLSPGERATLSCRASQSVSSYLAWYQQKPGQAPRLLIYDASNRATGIPARFSGSGSGTDFTLTISSLEPEDFAVYYCQQRSNWPPALTFGGGTKVEIKRTVAAPEIVLTQSPATLSLSPGERATLSCRASQSISDFLHWYQQKPGQAPRLLIKYASQSISGIPARFSGSGSGTDFTLTISSLEPEDFAVYYCQNGHNFPPTFGGGTKVEIKRTAELPPKVSVFVPPRDGFFGNPRKSKLICKATGFSPRQIQVSWLREGKQVGSGVTTKQVQAEAKESGPTTYKVTSTLTIKESDWLGQSMFTCRVDHRGLTFQQNASSMC

SEQ ID NO: 268 - protein, 581 aa, Artificial Sequence; identical to SEQ ID NO: 130
  source: /note="Description of Artificial Sequence: Synthetic polypeptide"

SEQ ID NO: 269 - protein, 333 aa, Artificial Sequence; identical to SEQ ID NO: 131
  source: /note="Description of Artificial Sequence: Synthetic polypeptide"

SEQ ID NO: 270 - protein, 581 aa, Artificial Sequence
  source: /note="Description of Artificial Sequence: Synthetic polypeptide"
QVQLQQWGAGLLKPSETLSLTCAVYGGSFSGYYWSWIRQSPEKGLEWIGEINHGGYVTYNPSLESRVTISVDTSKNQFSLKLSSVTAADTAVYYCARDYGPGNYDWYFDLWGRGTLVTVSSASTKGPEVQLVESGGGLVQPGGSLRLSCAASGFAFSSYDMSWVRQAPGKGLEWVSYISGGGFTYYPDTVKGRFTISRDNSKNTLYLQMNSLRAEDTAVYYCARQGANWELVYWGQGTLVTVSSASTELPPKVSVFVPPRDGFFGNPRKSELICEATGFSPRQIQVSWLREGKQVGSGVTTDQVQAEAKESGPTTYDVTSTLTIKESDWLGQSMFTCRVDHRGLTFQQNASSMCDKTHTCPPCPAPELLGGPSVFLFPPKPKDTLMISRTPEVTCVVVDVSHEDPEVKFNWYVDGVEVHNAKTKPREEQYNSTYRVVSVLTVLHQDWLNGKEYKCKVSNKALPAPIEKTISKAKGQPREPQVYTLPPSREEMTKNQVSLWCLVKGFYPSDIAVEWESNGQPENNYKTTPPVLDSDGSFFLYSKLTVDKSRWQQGNVFSCSVMHEALHNHYTQKSLSLSPGK

SEQ ID NO: 271 - protein, 339 aa, Artificial Sequence; identical to SEQ ID NO: 263
  source: /note="Description of Artificial Sequence: Synthetic polypeptide"

SEQ ID NO: 272 - protein, 581 aa, Artificial Sequence; identical to SEQ ID NO: 130
  source: /note="Description of Artificial Sequence: Synthetic polypeptide"

SEQ ID NO: 273 - protein, 333 aa, Artificial Sequence; identical to SEQ ID NO: 131
  source: /note="Description of Artificial Sequence: Synthetic polypeptide"

SEQ ID NO: 274 - protein, 581 aa, Artificial Sequence; identical to SEQ ID NO: 270
  source: /note="Description of Artificial Sequence: Synthetic polypeptide"

SEQ ID NO: 275 - protein, 332 aa, Artificial Sequence; identical to SEQ ID NO: 267
  source: /note="Description of Artificial Sequence: Synthetic polypeptide"

SEQ ID NO: 276 - protein, 581 aa, Artificial Sequence; identical to SEQ ID NO: 130
  source: /note="Description of Artificial Sequence: Synthetic polypeptide"

SEQ ID NO: 277 - protein, 333 aa, Artificial Sequence; identical to SEQ ID NO: 131
  source: /note="Description of Artificial Sequence: Synthetic polypeptide"

SEQ ID NO: 278 - protein, 588 aa, Artificial Sequence
  source: /note="Description of Artificial Sequence: Synthetic polypeptide"
EVQLVESGGGLVQPGGSLRLSCAASGFAFSSYDMSWVRQAPGKGLEWVSYISGGGFTYYPDTVKGRFTISRDNSKNTLYLQMNSLRAEDTAVYYCARQGANWELVYWGQGTLVTVSSASTKGPSVFPLAPQVQLQQWGAGLLKPSETLSLTCAVYGGSFSGYYWSWIRQSPEKGLEWIGEINHGGYVTYNPSLESRVTISVDTSKNQFSLKLSSVTAADTAVYYCARDYGPGNYDWYFDLWGRGTLVTVSSASTELPPKVSVFVPPRDGFFGNPRKSELICEATGFSPRQIQVSWLREGKQVGSGVTTDQVQAEAKESGPTTYDVTSTLTIKESDWLGQSMFTCRVDHRGLTFQQNASSMCDKTHTCPPCPAPELLGGPSVFLFPPKPKDTLMISRTPEVTCVVVDVSHEDPEVKFNWYVDGVEVHNAKTKPREEQYNSTYRVVSVLTVLHQDWLNGKEYKCKVSNKALPAPIEKTISKAKGQPREPQVYTLPPSREEMTKNQVSLWCLVKGFYPSDIAVEWESNGQPENNYKTTPPVLDSDGSFFLYSKLTVDKSRWQQGNVFSCSVMHEALHNHYTQKSLSLSPGK

SEQ ID NO: 279 - protein, 339 aa, Artificial Sequence
  source: /note="Description of Artificial Sequence: Synthetic polypeptide"
EIVLTQSPATLSLSPGERATLSCRASQSISDFLHWYQQKPGQAPRLLIKYASQSISGIPARFSGSGSGTDFTLTISSLEPEDFAVYYCQNGHNFPPTFGGGTKVEIKRTVAAPSVFIFPPEIVLTQSPATLSLSPGERATLSCRASQSVSSYLAWYQQKPGQAPRLLIYDASNRATGIPARFSGSGSGTDFTLTISSLEPEDFAVYYCQQRSNWPPALTFGGGTKVEIKRTAELPPKVSVFVPPRDGFFGNPRKSKLICKATGFSPRQIQVSWLREGKQVGSGVTTKQVQAEAKESGPTTYKVTSTLTIKESDWLGQSMFTCRVDHRGLTFQQNASSMC

SEQ ID NO: 280 - protein, 581 aa, Artificial Sequence; identical to SEQ ID NO: 130
  source: /note="Description of Artificial Sequence: Synthetic polypeptide"

SEQ ID NO: 281 - protein, 333 aa, Artificial Sequence; identical to SEQ ID NO: 131
  source: /note="Description of Artificial Sequence: Synthetic polypeptide"

SEQ ID NO: 282 - protein, 588 aa, Artificial Sequence; identical to SEQ ID NO: 278
  source: /note="Description of Artificial Sequence: Synthetic polypeptide"

SEQ ID NO: 283 - protein, 332 aa, Artificial Sequence
  source: /note="Description of Artificial Sequence: Synthetic polypeptide"
EIVLTQSPATLSLSPGERATLSCRASQSISDFLHWYQQKPGQAPRLLIKYASQSISGIPARFSGSGSGTDFTLTISSLEPEDFAVYYCQNGHNFPPTFGGGTKVEIKRTVAAPEIVLTQSPATLSLSPGERATLSCRASQSVSSYLAWYQQKPGQAPRLLIYDASNRATGIPARFSGSGSGTDFTLTISSLEPEDFAVYYCQQRSNWPPALTFGGGTKVEIKRTAELPPKVSVFVPPRDGFFGNPRKSKLICKATGFSPRQIQVSWLREGKQVGSGVTTKQVQAEAKESGPTTYKVTSTLTIKESDWLGQSMFTCRVDHRGLTFQQNASSMC

SEQ ID NO: 284 - protein, 581 aa, Artificial Sequence; identical to SEQ ID NO: 130
  source: /note="Description of Artificial Sequence: Synthetic polypeptide"

SEQ ID NO: 285 - protein, 333 aa, Artificial Sequence; identical to SEQ ID NO: 131
  source: /note="Description of Artificial Sequence: Synthetic polypeptide"

SEQ ID NO: 286 - protein, 581 aa, Artificial Sequence
  source: /note="Description of Artificial Sequence: Synthetic polypeptide"
EVQLVESGGGLVQPGGSLRLSCAASGFAFSSYDMSWVRQAPGKGLEWVSYISGGGFTYYPDTVKGRFTISRDNSKNTLYLQMNSLRAEDTAVYYCARQGANWELVYWGQGTLVTVSSASTKGPQVQLQQWGAGLLKPSETLSLTCAVYGGSFSGYYWSWIRQSPEKGLEWIGEINHGGYVTYNPSLESRVTISVDTSKNQFSLKLSSVTAADTAVYYCARDYGPGNYDWYFDLWGRGTLVTVSSASTELPPKVSVFVPPRDGFFGNPRKSELICEATGFSPRQIQVSWLREGKQVGSGVTTDQVQAEAKESGPTTYDVTSTLTIKESDWLGQSMFTCRVDHRGLTFQQNASSMCDKTHTCPPCPAPELLGGPSVFLFPPKPKDTLMISRTPEVTCVVVDVSHEDPEVKFNWYVDGVEVHNAKTKPREEQYNSTYRVVSVLTVLHQDWLNGKEYKCKVSNKALPAPIEKTISKAKGQPREPQVYTLPPSREEMTKNQVSLWCLVKGFYPSDIAVEWESNGQPENNYKTTPPVLDSDGSFFLYSKLTVDKSRWQQGNVFSCSVMHEALHNHYTQKSLSLSPGK

SEQ ID NO: 287 - protein, 339 aa, Artificial Sequence; identical to SEQ ID NO: 279
  source: /note="Description of Artificial Sequence: Synthetic polypeptide"

SEQ ID NO: 288 - protein, 581 aa, Artificial Sequence; identical to SEQ ID NO: 130
  source: /note="Description of Artificial Sequence: Synthetic polypeptide"

SEQ ID NO: 289 - protein, 333 aa, Artificial Sequence; identical to SEQ ID NO: 131
  source: /note="Description of Artificial Sequence: Synthetic polypeptide"

SEQ ID NO: 290 - protein, 581 aa, Artificial Sequence; identical to SEQ ID NO: 286
  source: /note="Description of Artificial Sequence: Synthetic polypeptide"

SEQ ID NO: 291 - protein, 332 aa, Artificial Sequence; identical to SEQ ID NO: 283
  source: /note="Description of Artificial Sequence: Synthetic polypeptide"

SEQ ID NO: 292 - protein, 581 aa, Artificial Sequence; identical to SEQ ID NO: 130
  source: /note="Description of Artificial Sequence: Synthetic polypeptide"

SEQ ID NO: 293 - protein, 333 aa, Artificial Sequence; identical to SEQ ID NO: 131
  source: /note="Description of Artificial Sequence: Synthetic polypeptide"

SEQ ID NO: 294 - protein, 125 aa, Artificial Sequence
  source: /note="Description of Artificial Sequence: Synthetic polypeptide"
EVQLVESGGGVVQPGRSLRLSCVASGFPFNNYWMTWIRQAPGKGLEWIASITITGGTTYYPGSVKGRFTISRDNSKSTLYLQMNSLRAEDTAVYYCTRERYSTEYYPYYWYFDFWGQGTMVTVSS

SEQ ID NO: 295 - protein, 107 aa, Artificial Sequence
  source: /note="Description of Artificial Sequence: Synthetic polypeptide"
DIQMTQSPSSLSASVGDRVTITCRTSQDIGNYLRWFQQKPGKSPKLMIYDAINLAAGVPSRFSGSGSGTDYTLTISSLQPEDVATYYCLQHNEYPYTFGQGTKLEIK

SEQ ID NO: 296 - protein, 118 aa, Artificial Sequence
  source: /note="Description of Artificial Sequence: Synthetic polypeptide"
EVQLVQSGAEVKKPGSSVKVSCKASGYTFTDYYMNWVKQAPGKGLEWIGLINPNSGGINYNQKFKVKATLTVDKSTSTAYMELSSLRSEDTAVYYCARRDYGTSGDYWGQGTTVTVSS

SEQ ID NO: 297 - protein, 107 aa, Artificial Sequence
  source: /note="Description of Artificial Sequence: Synthetic polypeptide"
DIQMTQSPSSLSASVGDRVTITCHASQNINVWLSWYQQKPGKAPKLLIYKASNLHTGVPSRFSGSGSGTDFTLTISSLQPEDFATYYCQQGQSYPLTFGQGTKLEIK

SEQ ID NO: 298 - protein, 685 aa, Artificial Sequence
  source: /note="Description of Artificial Sequence: Synthetic polypeptide"
EVQLVESGGGVVQPGRSLRLSCVASGFPFNNYWMTWIRQAPGKGLEWIASITITGGTTYYPGSVKGRFTISRDNSKSTLYLQMNSLRAEDTAVYYCTRERYSTEYYPYYWYFDFWGQGTMVTVSSVIAELPPKVSVFVPPRDGFFGNPRKSELICEATGFSPRQIQVSWLREGKQVGSGVTTDQVQAEAKESGPTTYDVTSTLTIKESDWLGQSMFTCRVDHRGLTFQQNASSMCGGEVQLVQSGAEVKKPGSSVKVSCKASGYTFTDYYMNWVKQAPGKGLEWIGLINPNSGGINYNQKFKVKATLTVDKSTSTAYMELSSLRSEDTAVYYCARRDYGTSGDYWGQGTTVTVSSASTKGPSVFPLAPSSKSTSGGTAALGCLVKDYFPEPVTVSWNSGALTSGVHTFPAVLQSSGLYSLSSVVTVPSSSLGTQTYICNVNHKPSNTKVDKKVEPKSCDKTHTCPPCPAPEAAGGPSVFLFPPKPKDTLMISRTPEVTCVVVDVSHEDPEVKFNWYVDGVEVHNAKTKPREEQYNSTYRVVSVLTVLHQDWLNGKEYKCKVSNKALPAPIEKTISKAKGQPREPQVYTLPPSREEMTKNQVSLTCLVKGFYPSDIAVEWESNGQPENNYKTTPPVLDSDGSFFLYSKLTVDKSRWQQGNVFSCSVMHEALHNHYTQKSLSLSPGK

SEQ ID NO: 299 - protein, 217 aa, Artificial Sequence
  source: /note="Description of Artificial Sequence: Synthetic polypeptide"
DIQMTQSPSSLSASVGDRVTITCRTSQDIGNYLRWFQQKPGKSPKLMIYDAINLAAGVPSRFSGSGSGTDYTLTISSLQPEDVATYYCLQHNEYPYTFGQGTKLEIKVIAELPPKVSVFVPPRDGFFGNPRKSKLICKATGFSPRQIQVSWLREGKQVGSGVTTKQVQAEAKESGPTTYKVTSTLTIKESDWLGQSMFTCRVDHRGLTFQQNASSMC

SEQ ID NO: 300 - protein, 214 aa, Artificial Sequence
  source: /note="Description of Artificial Sequence: Synthetic polypeptide"
DIQMTQSPSSLSASVGDRVTITCHASQNINVWLSWYQQKPGKAPKLLIYKASNLHTGVPSRFSGSGSGTDFTLTISSLQPEDFATYYCQQGQSYPLTFGQGTKLEIKRTVAAPSVFIFPPSDEQLKSGTASVVCLLNNFYPREAKVQWKVDNALQSGNSQESVTEQDSKDSTYSLSSTLTLSKADYEKHKVYACEVTHQGLSSPVTKSFNRGEC

SEQ ID NO: 301 - protein, 667 aa, Artificial Sequence
  source: /note="Description of Artificial Sequence: Synthetic polypeptide"
DIQMTQSPSSLSASVGDRVTITCRTSQDIGNYLRWFQQKPGKSPKLMIYDAINLAAGVPSRFSGSGSGTDYTLTISSLQPEDVATYYCLQHNEYPYTFGQGTKLEIKVIAELPPKVSVFVPPRDGFFGNPRKSELICEATGFSPRQIQVSWLREGKQVGSGVTTDQVQAEAKESGPTTYDVTSTLTIKESDWLGQSMFTCRVDHRGLTFQQNASSMCGGEVQLVQSGAEVKKPGSSVKVSCKASGYTFTDYYMNWVKQAPGKGLEWIGLINPNSGGINYNQKFKVKATLTVDKSTSTAYMELSSLRSEDTAVYYCARRDYGTSGDYWGQGTTVTVSSASTKGPSVFPLAPSSKSTSGGTAALGCLVKDYFPEPVTVSWNSGALTSGVHTFPAVLQSSGLYSLSSVVTVPSSSLGTQTYICNVNHKPSNTKVDKKVEPKSCDKTHTCPPCPAPEAAGGPSVFLFPPKPKDTLMISRTPEVTCVVVDVSHEDPEVKFNWYVDGVEVHNAKTKPREEQYNSTYRVVSVLTVLHQDWLNGKEYKCKVSNKALPAPIEKTISKAKGQPREPQVYTLPPSREEMTKNQVSLTCLVKGFYPSDIAVEWESNGQPENNYKTTPPVLDSDGSFFLYSKLTVDKSRWQQGNVFSCSVMHEALHNHYTQKSLSLSPGK

SEQ ID NO: 302 - protein, 235 aa, Artificial Sequence
  source: /note="Description of Artificial Sequence: Synthetic polypeptide"
EVQLVESGGGVVQPGRSLRLSCVASGFPFNNYWMTWIRQAPGKGLEWIASITITGGTTYYPGSVKGRFTISRDNSKSTLYLQMNSLRAEDTAVYYCTRERYSTEYYPYYWYFDFWGQGTMVTVSSVIAELPPKVSVFVPPRDGFFGNPRKSKLICKATGFSPRQIQVSWLREGKQVGSGVTTKQVQAEAKESGPTTYKVTSTLTIKESDWLGQSMFTCRVDHRGLTFQQNASSMC

SEQ ID NO: 303 - protein, 214 aa, Artificial Sequence; identical to SEQ ID NO: 300
  source: /note="Description of Artificial Sequence: Synthetic polypeptide"

SEQ ID NO: 304 - protein, 664 aa, Artificial Sequence
  source: /note="Description of Artificial Sequence: Synthetic polypeptide"
DIQMTQSPSSLSASVGDRVTITCRTSQDIGNYLRWFQQKPGKSPKLMIYDAINLAAGVPSRFSGSGSGTDYTLTISSLQPEDVATYYCLQHNEYPYTFGQGTKLEIKRTVAAPSVFIFPPSDEQLKSGTASVVCLLNNFYPREAKVQWKVDNALQSGNSQESVTEQDSKDSTYSLSSTLTLSKADYEKHKVYACEVTHQGLSSPVTKSFNRGECGGEVQLVQSGAEVKKPGSSVKVSCKASGYTFTDYYMNWVKQAPGKGLEWIGLINPNSGGINYNQKFKVKATLTVDKSTSTAYMELSSLRSEDTAVYYCARRDYGTSGDYWGQGTTVTVSSASTKGPSVFPLAPSSKSTSGGTAALGCLVKDYFPEPVTVSWNSGALTSGVHTFPAVLQSSGLYSLSSVVTVPSSSLGTQTYICNVNHKPSNTKVDKKVEPKSCDKTHTCPPCPAPEAAGGPSVFLFPPKPKDTLMISRTPEVTCVVVDVSHEDPEVKFNWYVDGVEVHNAKTKPREEQYNSTYRVVSVLTVLHQDWLNGKEYKCKVSNKALPAPIEKTISKAKGQPREPQVYTLPPSREEMTKNQVSLTCLVKGFYPSDIAVEWESNGQPENNYKTTPPVLDSDGSFFLYSKLTVDKSRWQQGNVFSCSVMHEALHNHYTQKSLSLSPGK

SEQ ID NO: 305 - protein, 228 aa, Artificial Sequence
  source: /note="Description of Artificial Sequence: Synthetic polypeptide"
EVQLVESGGGVVQPGRSLRLSCVASGFPFNNYWMTWIRQAPGKGLEWIASITITGGTTYYPGSVKGRFTISRDNSKSTLYLQMNSLRAEDTAVYYCTRERYSTEYYPYYWYFDFWGQGTMVTVSSASTKGPSVFPLAPSSKSTSGGTAALGCLVKDYFPEPVTVSWNSGALTSGVHTFPAVLQSSGLYSLSSVVTVPSSSLGTQTYICNVNHKPSNTKVDKKVEPKSC

SEQ ID NO: 306 - protein, 214 aa, Artificial Sequence; identical to SEQ ID NO: 300
  source: /note="Description of Artificial Sequence: Synthetic polypeptide"

SEQ ID NO: 307 - protein, 119 aa, Artificial Sequence; identical to SEQ ID NO: 66
  source: /note="Description of Artificial Sequence: Synthetic polypeptide"

SEQ ID NO: 308 - protein, 107 aa, Artificial Sequence; identical to SEQ ID NO: 67
  source: /note="Description of Artificial Sequence: Synthetic polypeptide"

SEQ ID NO: 309 - protein, 120 aa, Artificial Sequence [sequence omitted]

SEQ ID NO: 310 - protein, 107 aa, Artificial Sequence [sequence omitted]

SEQ ID NO: 311 - protein, 457 aa, Artificial Sequence
  source: /note="Description of Artificial Sequence: Synthetic polypeptide"
EVQLVESGGGLVQPGGSLRLSCAASGFNIKDTYIHWVRQAPGKGLEWVARIYPTNGYTRYADSVKGRFTISADTSKNTAYLQMNSLRAEDTAVYYCSRWGGDGFYAMDYWGQGTLVTVSSASTELPPKVSVFVPPRDGFFGNPRKSKLICQATGFSPRQIQVSWLREGKQVGSGVTTDQVQAEAKESGPTTYKVTSTLTIKESDWLGQSMFTCRVDHRGLTFQQNASSMCDKTHTCPPCPAPELLGGPSVFLFPPKPKDTLMISRTPEVTCVVVDVSHEDPEVKFNWYVDGVEVHNAKTKPREEQYNSTYRVVSVLTVLHQDWLNGKEYKCKVSNKALPAPIEKTISKAKGQPREPQVYTLPPSREEMTKNQVSLTCLVKGFYPSDIAVEWESNGQPENNYKTTPPVLDSDGSFFLYSKLTVDKSRWQQGNVFSCSVMHEALHNHYTQKSLSLSPGK

SEQ ID NO: 312 - protein, 217 aa, Artificial Sequence; identical to SEQ ID NO: 69
  source: /note="Description of Artificial Sequence: Synthetic polypeptide"

SEQ ID NO: 313 - protein, 457 aa, Artificial Sequence
  source: /note="Description of Artificial Sequence: Synthetic polypeptide"
EVQLVESGGGLVQPGGSLRLSCAASGFNIKDTYIHWVRQAPGKGLEWVARIYPTNGYTRYADSVKGRFTISADTSKNTAYLQMNSLRAEDTAVYYCSRWGGDGFYAMDYWGQGTLVTVSSASTELPPKVSVFVPPRDGFFGNPRKSKLICKATGFSPRQIQVSWLREGKQVGSGVTTKQVQAEAKESGPTTYKVTSTLTIKESDWLGQSMFTCRVDHRGLTFQQNASSMCDKTHTCPPCPAPELLGGPSVFLFPPKPKDTLMISRTPEVTCVVVDVSHEDPEVKFNWYVDGVEVHNAKTKPREEQYNSTYRVVSVLTVLHQDWLNGKEYKCKVSNKALPAPIEKTISKAKGQPREPQVYTLPPSREEMTKNQVSLTCLVKGFYPSDIAVEWESNGQPENNYKTTPPVLDSDGSFFLYSKLTVDKSRWQQGNVFSCSVMHEALHNHYTQKSLSLSPGK

SEQ ID NO: 314 - protein, 217 aa, Artificial Sequence; identical to SEQ ID NO: 77
  source: /note="Description of Artificial Sequence: Synthetic polypeptide"

SEQ ID NO: 315 - protein, 457 aa, Artificial Sequence
  source: /note="Description of Artificial Sequence: Synthetic polypeptide"
EVQLVESGGGLVQPGGSLRLSCAASGFNIKDTYIHWVRQAPGKGLEWVARIYPTNGYTRYADSVKGRFTISADTSKNTAYLQMNSLRAEDTAVYYCSRWGGDGFYAMDYWGQGTLVTVSSASTELPPKVSVFVPPRDGFFGNPRKSKLACSATGFSPRQIQVSWLREGKQVGSGVTTDQVQAEAKESGPTTYKVASTLTIKESDWLGQSMFTCRVDHRGLTFQQNASSMCDKTHTCPPCPAPELLGGPSVFLFPPKPKDTLMISRTPEVTCVVVDVSHEDPEVKFNWYVDGVEVHNAKTKPREEQYNSTYRVVSVLTVLHQDWLNGKEYKCKVSNKALPAPIEKTISKAKGQPREPQVYTLPPSREEMTKNQVSLTCLVKGFYPSDIAVEWESNGQPENNYKTTPPVLDSDGSFFLYSKLTVDKSRWQQGNVFSCSVMHEALHNHYTQKSLSLSPGK

SEQ ID NO: 316 - protein, 217 aa, Artificial Sequence; identical to SEQ ID NO: 81
  source: /note="Description of Artificial Sequence: Synthetic polypeptide"

SEQ ID NO: 317 - protein, 457 aa, Artificial Sequence
  source: /note="Description of Artificial Sequence: Synthetic polypeptide"
EVQLVESGGGLVQPGGSLRLSCAASGFNIKDTYIHWVRQAPGKGLEWVARIYPTNGYTRYADSVKGRFTISADTSKNTAYLQMNSLRAEDTAVYYCSRWGGDGFYAMDYWGQGTLVTVSSASTELPPKVSVFVPPRDGFFGNPRKSELICEATGFSPRQIQVSWLREGKQVGSGVTTDQVQAEAKESGPTTYDVTSTLTIKESDWLGQSMFTCRVDHRGLTFQQNASSMCDKTHTCPPCPAPELLGGPSVFLFPPKPKDTLMISRTPEVTCVVVDVSHEDPEVKFNWYVDGVEVHNAKTKPREEQYNSTYRVVSVLTVLHQDWLNGKEYKCKVSNKALPAPIEKTISKAKGQPREPQVYTLPPSREEMTKNQVSLTCLVKGFYPSDIAVEWESNGQPENNYKTTPPVLDSDGSFFLYSKLTVDKSRWQQGNVFSCSVMHEALHNHYTQKSLSLSPGK

SEQ ID NO: 318 - protein, 217 aa, Artificial Sequence; identical to SEQ ID NO: 63
  source: /note="Description of Artificial Sequence: Synthetic polypeptide"

SEQ ID NO: 319 - protein, 457 aa, Artificial Sequence
  source: /note="Description of Artificial Sequence: Synthetic polypeptide"
EVQLVESGGGLVQPGGSLRLSCAASGFNIKDTYIHWVRQAPGKGLEWVARIYPTNGYTRYADSVKGRFTISADTSKNTAYLQMNSLRAEDTAVYYCSRWGGDGFYAMDYWGQGTLVTVSSASTELPPKVSVFVPPRDGFFGNPRKSKLWCQATGFSPRQIQVSWLREGKQVGSGVTTDQVQAEAKESGPTTYKVTSTLTIKESDWLGQSMFTCRVDHRGLTFQQNASSMCDKTHTCPPCPAPELLGGPSVFLFPPKPKDTLMISRTPEVTCVVVDVSHEDPEVKFNWYVDGVEVHNAKTKPREEQYNSTYRVVSVLTVLHQDWLNGKEYKCKVSNKALPAPIEKTISKAKGQPREPQVYTLPPSREEMTKNQVSLTCLVKGFYPSDIAVEWESNGQPENNYKTTPPVLDSDGSFFLYSKLTVDKSRWQQGNVFSCSVMHEALHNHYTQKSLSLSPGK

SEQ ID NO: 320 - protein, 217 aa, Artificial Sequence; identical to SEQ ID NO: 85
  source: /note="Description of Artificial Sequence: Synthetic polypeptide"

SEQ ID NO: 321 - protein, 449 aa, Artificial Sequence
  source: /note="Description of Artificial Sequence: Synthetic polypeptide"
QVQLKQSGPGLVQPSQSLSITCTVSGFSLTNYGVHWVRQSPGKGLEWLGVIWSGGNTDYNTPFTSRLSINKDNSKSQVFFKMNSLQSNDTAIYYCARALTYYDYEFAYWGQGTLVTVSAASTKGPSVFPLAPSSKSTSGGTAALGCLVKDYFPEPVTVSWNSGALTSGVHTFPAVLQSSGLYSLSSVVTVPSSSLGTQTYICNVNHKPSNTKVDKKVEPKSCDKTHTSPPSPAPELLGGPSVFLFPPKPKDTLMISRTPEVTCVVVDVSHEDPEVKFNWYVDGVEVHNAKTKPREEQYNSTYRVVSVLTVLHQDWLNGKEYKCKVSNKALPAPIEKTISKAKGQPREPQVYTLPPSREEMTKNQVSLTCLVKGFYPSDIAVEWESNGQPENNYKTTPPVLDSDGSFRLYSKLTVDKSRWQQGNVFSCSVMHEALHNHYTQKSLSLSPGK

SEQ ID NO: 322 - protein, 214 aa, Artificial Sequence; identical to SEQ ID NO: 71
  source: /note="Description of Artificial Sequence: Synthetic polypeptide"

SEQ ID NO: 323 - protein, 112 aa, Homo sapiens
VIAELPPKVSVFVPPRDGFFGNPRKSKLICQATGFSPRQIQVSWLREGKQVGSGVTTDQVQAEAKESGPTTYKVTSTLTIKESDWLGQSMFTCRVDHRGLTFQQNASSMCVP

SEQ ID NO: 324 - protein, 107 aa, Homo sapiens
VCSRDFTPPTVKILQSSCDGGGHFPPTIQLLCLVSGYTPGTINITWLEDGQVMDVDLSTASTTQEGELASTQSELTLSQKHWLSDRTYTCQVTYQGHTFEDSTKKCA

SEQ ID NO: 325 - protein, 112 aa, Artificial Sequence; identical to SEQ ID NO: 323
  source: /note="Description of Artificial Sequence: Synthetic polypeptide"

SEQ ID NO: 326 - protein, 112 aa, Artificial Sequence
  source: /note="Description of Artificial Sequence: Synthetic polypeptide"
VIAELPPKVSVFVPPRDGFFGNPRKSKLICKATGFSPRQIQVSWLREGKQVGSGVTTKQVQAEAKESGPTTYKVTSTLTIKESDWLGQSMFTCRVDHRGLTFQQNASSMCVP

SEQ ID NO: 327 - protein, 112 aa, Artificial Sequence
  source: /note="Description of Artificial Sequence: Synthetic polypeptide"
VIAELPPKVSVFVPPRDGFFGNPRKSELICEATGFSPRQIQVSWLREGKQVGSGVTTDQVQAEAKESGPTTYDVTSTLTIKESDWLGQSMFTCRVDHRGLTFQQNASSMCVP

SEQ ID NO: 328 - protein, 112 aa, Artificial Sequence; identical to SEQ ID NO: 323
  source: /note="Description of Artificial Sequence: Synthetic polypeptide"

SEQ ID NO: 329 - protein, 112 aa, Artificial Sequence
  source: /note="Description of Artificial Sequence: Synthetic polypeptide"
VIAELPPKVSVFVPPRDGFFGNPRKSKLWCQATGFSPRQIQVSWLREGKQVGSGVTTDQVQAEAKESGPTTYKVTSTLTIKESDWLGQSMFTCRVDHRGLTFQQNASSMCVP

SEQ ID NO: 330 - protein, 112 aa, Artificial Sequence
  source: /note="Description of Artificial Sequence: Synthetic polypeptide"
VIAELPPKVSVFVPPRDGFFGNPRKSKLACSATGFSPRQIQVSWLREGKQVGSGVTTDQVQAEAKESGPTTYKVASTLTIKESDWLGQSMFTCRVDHRGLTFQQNASSMCVP

SEQ ID NO: 331 - protein, 6 aa, Artificial Sequence
  source: /note="Description of Artificial Sequence: Synthetic 6xHis tag"
HHHHHH

SEQ ID NO: 332 - protein, 98 aa, Unknown; identical to SEQ ID NO: 44
  source: /note="Description of Unknown: wild type or engineered sequence"

SEQ ID NO: 333 - protein, 107 aa, Unknown [sequence omitted]

SEQ ID NO: 334 - protein, 104 aa, Unknown
  source: /note="Description of Unknown: wild type or engineered sequence"
PKANPTVTLFPPSSEELQANKATLVCLISDFYPGAVTVAWKADGSPVKAGVETTKPSKQSNNKYAASSYLSLTPEQWKSHRSYSCQVTHEGSTVEKTVAPTECS

SEQ ID NO: 335 - protein, 112 aa, Unknown; identical to SEQ ID NO: 323
  source: /note="Description of Unknown: wild type or engineered sequence"

SEQ ID NO: 336 - protein, 107 aa, Unknown; identical to SEQ ID NO: 324
  source: /note="Description of Unknown: wild type or engineered sequence"

SEQ ID NO: 337 - protein, 98 aa, Artificial Sequence; identical to SEQ ID NO: 44
  source: /note="Description of Artificial Sequence: Synthetic polypeptide"

SEQ ID NO: 338 - protein, 107 aa, Artificial Sequence [sequence omitted]

SEQ ID NO: 339 - protein, 112 aa, Artificial Sequence; identical to SEQ ID NO: 323
  source: /note="Description of Artificial Sequence: Synthetic polypeptide"

SEQ ID NO: 340 - protein, 108 aa, Artificial Sequence
  source: /note="Description of Artificial Sequence: Synthetic polypeptide"
VIAELPPKVSVFVPPRDGFFGNPRKSKLICQATGFSPRQIQVSWLREGKQVGSGVTTDQVQAESSGTYKVTSTLTIKESDWLGQSMFTCRVDHRGLTFQQNASSMCVP

SEQ ID NO: 341 - protein, 109 aa, Artificial Sequence
  source: /note="Description of Artificial Sequence: Synthetic polypeptide"
VIAELPPKVSVFVPPRDGFFGNPRKSKLICQATGFSPRQIQVSWLREGKQVGSGVTTDQVQAESKDSTYKVTSTLTIKESDWLGQSMFTCRVDHRGLTFQQNASSMCVP

SEQ ID NO: 342 - protein, 91 aa, Unknown
  source: /note="Description of Unknown: wild type or engineered sequence"
  MOD_RES (1)..(1): Any amino acid
XIQNPDPAVYQLRDSKSSDKSVCLFTDFDSQTNVSQSKDSDVYITDKTVLDMRSMDFKSNSAVAWSNKSDFACANAFNNSIIPEDTFFPSP

SEQ ID NO: 343 - protein, 129 aa, Unknown
  source: /note="Description of Unknown: wild type or engineered sequence"
EDLNKVFPPEVAVFEPSEAEISHTQKATLVCLATGFFPDHVELSWWVNGKEVHSGVSTDPQPLKEQPALNDSRYCLSSRLRVSATFWQNPRNHFRCQVQFYGLSENDEWTQDRAKPVTQIVSAEAWGRA

SEQ ID NO: 344 - protein, 98 aa, Unknown; identical to SEQ ID NO: 44
  source: /note="Description of Unknown: wild type or engineered sequence"

SEQ ID NO: 345 - protein, 107 aa, Unknown [sequence omitted]

SEQ ID NO: 346 - protein, 104 aa, Unknown; identical to SEQ ID NO: 334
  source: /note="Description of Unknown: wild type or engineered sequence"

SEQ ID NO: 347 - protein, 112 aa, Unknown; identical to SEQ ID NO: 323
  source: /note="Description of Unknown: wild type or engineered sequence"

SEQ ID NO: 348 - protein, 107 aa, Unknown; identical to SEQ ID NO: 324
  source: /note="Description of Unknown: wild type or engineered sequence"

1-115. (canceled)

116. A binding protein comprising a first heavy chain and a first light chain forming an antigen binding region and a constant region comprising a modified CH1 domain (CH1*) and a modified CL domain (CL*), wherein
a. the CH1* domain comprises an IgM CH2 domain, an IgE CH2 domain, or a variant thereof; and
b. the CL* domain comprises an IgM CH2 domain, an IgE CH2 domain, or a variant thereof,
and wherein the heavy chain and light chain interact at one or more interface between the CH1* and CL*.

117. The binding protein of claim 116, wherein the CH1* and CL* comprise variants of an IgM or IgE CH2 domain that have been modified to increase electrostatic or hydrophobic interactions at the one or more interface.

118. The binding protein of claim 116, wherein
a. the CH1* comprises a variant of an IgM or IgE CH2 domain, wherein the variant comprises at least one modified amino acid residue at the one or more interface, wherein the modified amino acid residue introduces a more positive or negative charge than the original residue being replaced; and
b. the CL* comprises a variant of an IgM or IgE CH2 domain, wherein the variant comprises at least one modified amino acid residue at the one or more interface, wherein the modified residue introduces a more negative charge than the original residue being replaced if the CH1* modified residue introduces a more positive charge, or wherein the CL* modified residue introduces a more positive charge if the CH1* modified residue introduces a more negative charge.

119. The binding protein of claim 116, wherein
a. the CH1* comprises a variant of an IgM or IgE CH2 domain, wherein the variant comprises at least one engineered protuberance at the one or more interface, the protuberance comprising at least one altered contact residue; and
b. the CL* comprises a variant of an IgM or IgE CH2 domain, wherein the variant comprises at least one engineered cavity at the one or more interface, the cavity comprising at least one altered contact residue; or
c. the CH1* comprises a variant of an IgM or IgE CH2 domain, wherein the variant comprises at least one engineered cavity at the one or more interface, the cavity comprising at least one altered contact residue; and
d. the CL* comprises a variant of an IgM or IgE CH2 domain, wherein the variant comprises at least one engineered protuberance at the one or more interface, the protuberance comprising at least one altered contact residue.

120. The binding protein of claim 119, further comprising at least one additional protuberance or cavity on the heavy chain, and at least one counterpart cavity or protuberance on the light chain, wherein the additional protuberance and cavity promote heavy chain and light chain pairing, and inhibit homodimer formation of two heavy chains or two light chains.

121. The binding protein of claim 117, wherein the IgM or IgE CH2 domain variants promote heavy chain and light chain heterodimer pairing, and inhibit homodimer pairing of two heavy chains or two light chains.

122. The binding protein of claim 117, wherein the IgM or IgE CH2 domain variant comprises a modification of a wild-type human IgM or IgE CH2 domain at one or more of amino acids D12, K20, I22, Q24, D81, K85.1, T86, and Q119.

123. The binding protein of claim 116, wherein the constant region comprises an IgG hinge region, and wherein the hinge region is further modified to remove at least one cysteine residue found in a wild-type IgG hinge region.

124. The binding protein of claim 116, wherein the IgM or IgE CH2 domain variant comprises a CH1, C kappa, or C lambda DE loop in place of a wild-type IgM or IgE CH2 DE loop.

125. The binding protein of claim 116, wherein the constant region prior to modification is a wild-type human IgG or fragment thereof, wherein the fragment lacks all or a part of an IgG CH3 domain.

126. The binding protein of claim 125, wherein the IgG constant region prior to modification is a human wild-type IgG1, IgG2a, IgG2b, IgG3, or IgG4 subtype.

127. The binding protein of claim 116, wherein the binding protein comprises a second heavy chain and a second light chain, wherein the second heavy chain and second light chain interact at one or more interface and form a second antigen binding region, wherein:
(a) the second heavy and light chains comprise a wild-type IgG heavy chain constant region and a wild-type IgG light chain constant region; or
(b) the first heavy chain comprises a modified CH3 domain, and the second heavy chain comprises a modified CH3 domain, and wherein the modified CH3 domains are preferably modified IgG CH3 domains, wherein the modifications promote pairing of the first and second heavy chains at one or more interface between the CH3 domains on the first and second heavy chains, and inhibit homodimer formation of two first heavy chains or two second heavy chains.

128. The binding protein of claim 116, wherein the binding protein is an antibody, a bispecific antibody, a dual variable domain immunoglobulin (DVD-Ig) binding protein, or a multispecific binding protein.

129. The binding protein of claim 116, wherein the IgM CH2 domain, IgE CH2 domain, or variant thereof is attached on the heavy chain and/or light chain via a linker.

130. The binding protein of claim 127, wherein the binding protein is a trispecific antibody comprising a second heavy chain and a second light chain, wherein:
(a) the second heavy chain comprises a second heavy chain variable domain (VH2) and a third heavy chain variable domain (VH3), and the second light chain comprises a second light chain variable domain (VL2) and a third light chain variable domain (VL3), which together form second and third binding sites for the same or different antigens; or
(b) the first heavy chain comprises a first heavy chain variable domain (VH1) and a second heavy chain variable domain (VH2), and the first light chain comprise a first light chain variable domain (VL1) and a second light chain variable domain (VL2), which together form first and second binding sites for the same or different antigens, and the second heavy chain comprises a third heavy chain variable domain (VH3), and the second light chain comprises a third light chain variable domain (VL3), which together form a third binding site for the same or a different antigen.

131. The binding protein of claim 127, wherein the binding protein is a tetraspecific antibody comprising a second heavy chain and a second light chain, wherein:
(a) wherein the first heavy chain comprises a first heavy chain variable domain (VH1) and a second heavy chain variable domain (VH2), and the first light chain comprise a first light chain variable domain (VL1) and a second light chain variable domain (VL2), which together form first and second binding sites for the same or different antigens; and
(b) wherein the second heavy chain comprises a third heavy chain variable domain (VH3) and a fourth heavy chain variable domain (VH4), and the second light chain comprises a third light chain variable domain (VL3) and a fourth light chain variable domain (VL4), which together form third and fourth binding sites for the same or different antigens.

132. The binding protein of claim 116, wherein the binding protein is capable of binding to one or more of CD3, EGFR, TNF, and a T-cell epitope.

133. A binding protein conjugate comprising the binding protein of claim 116, the binding protein conjugate further comprising an immunoadhesion molecule, an imaging agent, a therapeutic agent, or a cytotoxic agent.

134. An isolated nucleic acid encoding the binding protein of claim 116.

135. A vector comprising the isolated nucleic acid of claim 134.

136. A host cell comprising the vector of claim 135.

137. A method of producing a binding protein, comprising culturing the host cell of claim 136 in culture medium under conditions sufficient to produce the binding protein.

138. A pharmaceutical composition comprising the binding protein of claim 116, and a pharmaceutically acceptable carrier.

139. A method of treating a subject for a disease or a disorder by administering the binding protein of claim 116 to the subject.
